United States Patent Application Publication US 2026/0357256 A1 - sequence listing, part 6

SEQ ID NO: 9 - DNA, 58617616 bp, Homo sapiens (residues 10,855,116-13,026,138 of 58,617,616)
  source 1..58617616: mol_type = genomic DNA
caacctccaccttttgggttcaatcgattctcctgcctcagcgtcccaagtagctgggattacaggcacgtaacacctggctaatttttgtatttttagtagagacgaggtttcactatgttggccaggttgatctcgaactcctgacctcaggtgatccacccacctcagtctcccaaagggctgggattacaggcgtgagccaccgtgcccagccatctctttttttgtttgtttcttcagatggggtctctctgtgtcacccaggctggagtgcagtagcacgatctcagctcagtgcaccctccacttcccgggttcaaactattcttgtgcctcagcctctgaagtagctggaattacaggtgtgcaccacacctggctaattatttgtggggttttgttgttttttgttttgtttgtttctttttgagacagagtcttgctctgtcacccaggctggagttcagtggcgccatctcagctcactgcaacctccgcctcccgggttcaagtgattctcctgcctcagcctcctgagtaagtgggactacaggcacgtgccagcacgcctggctaattttttgtatttttagtagagacggggtttcacagtgttagccaggatggtctcgatctactgacctagtgatccacctgccttggcctcccaaagtgtggggattacaggcgtgagccactgcgcctggccaattatttatatttttaatatagacagaatttccctgtgttggctaggctggtcttgagcccctggcctcaagtaatccacctgcctcagcctcccaaagtgttgggattacaggcatgaatcaccgcacctggcctaagatatctatcctatgcaatgctagccagaggagtaaacctcttttcccagtggtaccaccaaagtcccagagttagctctcattggctccacttgggttacatgctcatcctgaaccaatcacaatagccaggagcgggggataggctaattggccagacacaaagtttgctaagtctcttgggtccagctgcattcatgttctttggttgggggttatggggtaagggctggctactcaaaggtaacctggagagacgacactgacctgcccactctcttttctgattttcctccagtgcccacttggatcttggtgctctccctgagcctggctggtgccctcttcctccttgctgggctggtggctgttgccctggtggtcagaaaaggtaacagcacgcaaagcctggcacacaagttgccagttgacaacttctggaacgtgaagatgtgcttacactcacaactcacaccattttgttttcaggttcagtaatttgttcatcacaccccttttaaaagtatttatttatttatttattatttttcttttcagacagaggctcgctctgtcgcccaggctggagtgcagtggcacgatctcggcccactgcaacctccgccttcgaggttcaagcaattctcctgcctcagcctctcaagtagctgggattacaggcgtgcaccaccatgcctcgccaatatttgtatttttagaagagatgtggttttgccatgttgcccaagctggtctggaactcctgacctcaggtgatccgcccacctcggcctcccaaagtgctgggattataggcatgagccacagtccccggcctaaaaattttttatttggagactcagtctgtcacccaggctggagtgcaatggcaggatcatagctcgctgcatccttgacctcctgggctcaagcagttctcctgcctcagcctcccaagtagctgggaccacaggtgcgtgccaccacatgcagctaattatttatttattttttttaggacagggtcttgctgtgttgcccaggctgggtaactcctgggctcaagcaatcctcccacctcagcctcccaaaagtcctgggaccacaggcacacactaccacacctggctaatttttaaaaaatattttttgttgagatagggtcttgctatattgcccaggctggtcttgaactcctgggttcaagtgatcttcctgcctcagcctcccaaaatgctggaattacaggcatgtgccaccatgcccagccaaattatgtgtgtttgtgtgtgtgtgtatgtgtgtgggtatatatgtgtgtgtatgtatatatatatgtgtgtatatatatacatacacacacacacacatacatatatatatatatatatatatatatatttttttttttttttttttaagatggagtcttgccctgtcacccaggctggagtgcagtgaggcgatctcgactcacttgctctgttgccagcctggagtgcagtggcacaatctcgactcagtgcaacctccgcctcccaggttaaagtgattctcctgcctcagcctcccgagtagctgggactacaggtgcgtgccaccacacccagctaacttttgtatttttagtggagacagggtttcaccatgttgtccaggatggcccagcactttgggaggccgaggtgggcagatcgcgaggtcaggagtttgagaccagcctgggcaatatggtgaaaccccatctctaatgaaaacacaaaaattagccgggcgtggtggtgtgcacctgtagtcccagctacatgggagggtgaggcagaagaatcgcttgaacctgggaggcagaggttgcagtgagtcaagatcataccactgcactccagcctgggcgacagaacgagactctgtctcaaaaaacaacaaaaaaagaaagaaagaaagaaagaaagaaagaaagaaagaaaaatctgaggccttccaggctgggtggggtggcttgcctgtaatcccagcactttgaaaggccgaggcaagtggatcacttgaggtcaggagttcgagaccagtctggccaacatgacgaaccctcttctctactaaaatacaaaaatagcctggcctggtgatgcacacttgtaatcccagctactcgagaggctgaggcaggagaattgcttaaatccaggaggcagaggttgcagtgagccaagattgagccactgcactccagcctgggtgaaagaatgagactctgtctaaaaaaaaaaaaaaaaaaaaaaaaaacagaaattgccggatacaattaggaccaaaatctaacacatgctcatttcttttttgttccagttaaactcagaaatttacagaagaaaaggtgagatcatccctggagacccacagagggtggtttggggaaagaaggacacttccctggcagggtgggcactccatgccccccacaaacagcgcctcctggtgggcatgctgcgtaataggaacaggagccatttattaagtgcctcctgtgtgctggaggactgagctgggactctctgaagctggagctccttatccttatggcagccctggaaacaggcaccatgaatagccctattttacagaagagaggactgaggctcagcactcagtcacagagtgagcagtttgcccagggagaggcccttccccacacccctttacctccagctgccagaaaacggtcacaatcactctagacacccacagtcagtttctaaagaatgcccctggggttgtgcagtgcccaattgcactgtaggtgatggcccaggttcctgggcaccaggatgtcctaactggccctggcctcagtttctctcctccgagagtggggagacatcctgctgcctggagatgaaaacctgctctggggattgaatcccagcttcacctggctgtgggcctcctaaccaggagaatatatatatgtttttttttttttttttgagatggagtttcactcttgttgcccaggctggagtgcaatggcctgatctctggctcaccgcaacctctgcctcctgcgttcaagcagttctcctgcctcagcctcctgagcagctgggattacaggcatgtgccaccacacccggctaattttgtatttttagtagagacgggatttctccatgttggtccgggtggtcttgaactcccaacctcaggtgatccgcccgcctgtgcctcccaaagtgctgggattacaggcatcagccaccgtgcctggcttttatatatgtgtgtgtgtgtgtgtgtgtgtgtgtgtgtgtgtatgtgtgtgtgtatatgtgtgtgtgtgtatgtatgtgtgtgtgtgtatgtatgtgtgtgtgtgtgtgtgtatatatatatatatatatatatatatatatatatatttttttttttttttttagacggagtctcactctgtcgcccaggctggagtacagtggcgcaatctcggctcactgcaacctccgcctcctgggttcaagcgattctcctgcctcagactcctgagtagctgggactacaggcacatgccaccacacctggctaatttttgtattttttagtagagacggggtttcactgtgttgtccagtctggtcttgaactcctgacctcaagtgatccacctgcctcagcctcccaaagtgctgggattacaggcgtgagccactgcgcctggcccaagagaatttccatgtttttttcttcccccggccaaggggctgtcccacagtgtgacagctccagaaatcaggatgttactgctcttctgtggggaagacccatgggtcagtgggtggggagcaaaggctacattttgggtgtggtttggggccagggctttcccgatcaagcctcctgactcaaggggcaaccctgatccctgtcactttctcctgaattcctttgcagagatcgagaatcctgctgggcccagattaacttcgacagcacaggtctgtgcctccacactcctgactccagtggggaaaggattacacctccaaatgccatcaggcctcatcacacaccaatcaaatttcttctgtgactgcttgttccctttagggtcaaaacacaccctcgccacctcttcccctgggttctcaccttctctcctttgacttaacctaaaggtcacctcctctgggaagccttccctgactccctagacagggtctgtgcctgctacttacaggaccccaggtccgaccattcttcttacccctcggtagaaatacaattaggcggccaggcgcggtgactcacaactgtcatcccagcactttaggaggctgaggcaggcagatcacgaggtcaggaattcgagatcagcctggccaacatagtgaaaccccgtctctactaaaaatacaaaaaaattagcagggtgtggtggcggacacctgtaatcccagctacttgggaggctgaggcaaggagaatcatgtgaacctgggaggcggaggttgcagtcagctgagattgcgccactgcactctagcctgggcaacagagccagactccatctcaaaaaaaaaaaaaaaaaaaaaaaaaggccaggcgtggtggctcacgcctgtaatcccagcactttgggaggccgaggtgggcggatcacgaggtcaggagatcgagaccatcctggctaaaacagtgaaaccccatctctactaaaaatacaaaaaattaggtgggcgtggtggcgggtgcctgtagtcccagctgctcaggaggctgaggcaggagaatggcgtgaacccaggaggcagagcttgcagtgagcccagatcgcgccactgtactccagcctgggcgacagagcgagactccatctcaaaaaaaaaaaaaaaaagaaagggccaggcacggtggctcacgcctgtaatcccagcactttgggaggccaaggcaggtggatcacgaggtcaggagatcgagaccatcctggccaacatggtgaaaccctgtctctactgaaaatacaaaaattagctgggcatggtggcgtgttcctgtagtcccagctacttgggaggctgagacaggagaatcacttgaacccaggaggcagaggttgcagtgagccaagattgcgccactgcactccagcctggtgacagagtgagactccatctcaaaaaaggaagaaagaaacaaaaatgaaacaattaagtgatcattgggtgcttgcatatttcatactcatttcctctgctgaacggccagctccatggggaaaggaccatgtctatctccgggactccagggccacacttgccttccagaacatgccattctgccagcttccccaagggggcgaaaggcagccagtctgtcatgcaggatattctcttgaaggcaccccaagcagagaaatgtattctctgtacttcattcctggtccaacacacacacttattgagcacttactatgtgctaagatctgagagggtcctttcgtaaccaagacagatgtgctgtctgtccacaagcccattctccaatgggaaacagcccgtgatggcaccagactgtgtctgggacaaggcaggtggtcccctgaggaagtgatgtttttctttttttttttgagatggagtctcattgtgtcgcccaggttggagtgcagtggcacgatctcagcttactgcaacctctgcctcccgggttcaagtgattctcctgccccagcctcccgagtagctgggattacaggcacgtgccaccatgcccggctaatttttgtatttttagtagaggtagggtttcaccatgttggcctggctggtctcgaactcatgacctcaggtgatccacccacctcagcctcccaaagtgctgagattacaggcaattacaggcgtgagccaccgcccttttgttgttgttgttttttgtttgtttttgttttgaggcggagtctcactctgtcgcccaggctggagtgcggtgacgcgatctgggctcactgcaagctctgcctcctgggttcaagccattctcctgcctcagcctcctgagtagctgggactacaggcgcccgccaccacacccggctaattttttgtatttttttagtagagatgggatttcaccatgttagccaggatggtctcgatctcctgacctcgtgatctgcccgcctcagcctcctaaagtgctgggattacaggcatgagccaccgcgcccagcctgtttttttttttttttttttttgagacagagtcttgctctgtcacccagacaggaacgcagtggcgcaatcatagctcactgcagcctcgacctcctaggctgaagtgatcctcccctctcagcctcctgagtagctgggaccacaggcatacaccaccacactcagctactttttaaatttttttttctagagacaaaaaattatgttgcccaggctggtcttgaactcctgggctcaagtgatcctccctccttggccttccaaagcgttgggattacagccgtgagccacctcacctggctagaagtgatgtttaagcagagacctacaagaatgggtaatggaggccgggtgtggtggctcacacctgtaatcccagcattttgggaggccgaggcaggcagatctcttggggcaaggagttcaagaccaacctggccaacatggtgaatccctatctctactaagaatatgaaaattagctaggtgtagtggtgcatgcctgtaatcccagctattaggaggctgaggcaggacaatcacttgaacccaggaggcggaagttgcattgagccgagatcctgtcattgcactccagcctgggcaacagagtgagactccttctcaaaaacaagaaaaaaaaaatgggtgatggagcaattggaggagagcctggggaggaggaggagctggcaggtgctccttctggaaggcctgagataagacacccattttcctgagggcagtgagagatacccctaggaagactgtgtgtagaaggacttggttcactttgtagctgtgaacagttcaccgtgcagaatgggttggaaaggcgccatagaggatgctgggagatggaccccaattgcttccctgtgggctggggggcagtgcggggatggcagggagcagggaagttacaactggcccccaatcctgggttttctttctctttctgtttcagacatgtccttcgataactccctgtttaccgtctccgcggtgagtggttctttttcttggaaccggttttctgctgaccgtcctaccgggagaacggggcgggctcaaggggcaccacgaggctaagttgacctgctgtctctaagctgcgggggggctaggaaaagcccagaatcactgaacagggactcagtagtgagccgagagttggctgtgaaaaaatcccagggggtgtgttaattgaaggtggtgacgtcaggctgtcttgtggccacaggcaggcaggccccttggtggtatgtcctggcctggtcagtgctgcctttggtctcagtcatgacagcccctcagaatggtgacagaggattcagggtgacctggtggcctctcatagaggcttgtgacaatctgtgtcacaatctgtgacaggctgtggtcggtcccctctgggtataaagaaaagcatgaagttgctgggtgcggtgactcacgtctgtaatcccagcactttggaaggccgaggcgggtgtgggtcaggagtttgagaccagcctgaccaatatggtgaaacctcatctctgctaaatacaaaaaattagctgggcgtggtggtgcatgcttgtaatctcagctacttgggaggctgagacaggagaatcacttggacccaggaggtggaggtagcagtgagccaagattgaggcattgcactccagcctgggccacaagagcaaaactccatctaaaacaaacaaacagataaaaatgaaaaagtacaaatgccaaggctaccccaaaatgtagctgtgcagagagtcccatagacccaggtttaaatcccagccctgacactgtgtgacaatggggaacaatatcccccaaaagcagagggagggatttgttttttttcaagacagagtctagctctgtcgcccaggctggagcacagtggtgtgatctcggctcacacaacttccgactcccgggttcaagcaattctcatgcctcagcctcccgggcagctgggattacaggcacatgctaccacacccagctgatttttgtatttttagtagagacgggggtttcaccatgctggccaggctggtctcaaactcctgacctcaggtgatccactgggattacaggtgtgagccaccatgctggctggctgcggaagctgctttagacaggagatcaggaaagtctgagatgggtgacaagcaggaggtggggaagattggggatgattgatccaggctgaggacacatttttggcacagcccagtaagctggggtggagtgaggagtcgaaggggaccccatgaagaactttgattttactgctattgagctgggatcccggaagggttcctagtataggagggaggggaccggattcaggtgcacacaggcgccctctggtggcttctgcaggaggacagatttggggaaagcggggatcagtggaaggcaggagcctggagactgaagagctgggccaagcgtgcaccaaagggtgggtggtttggtccaaaatgttggcagtggagttcgaagaagtgatcagatgcaggttaggggagatataggggagagaaaacacagagctgatttttgatgagggggccaagggagaagagggaggccaaggagggtgaggcttggagggtcaggagtgtggagtcagccacctcaacccatggcgcctgggagcagatggagaggggagtctacagttcaggagagaggtcagttctagagatagactaggagtgcctgggatacagatggtaggaaggaagggggcttggcacgggcctgtgcagccctctgaggtctctgcttccagaataaatcctgaggccataagaaaaacccggcaggcagggctcaatctaaacgtttccatgagaatccacaccgcacagaacaccagcctggtgatgccccctctccccactttttgaggtagtttttatttatttttgtttgttttttgagatggagtcttgctctgtcacccaggctggagtgcagtggcttgatctcactgcaacctccacctcctggattcaagcgattctcctgcctcagcttcccgagtagctgggattacaggcgcctgccatcgcgcccggctaatttttgtatttttagtagagacgggttttcatcatgttggccaggctggtctccaacaaccgacctcaggtgatccgcccgccttggcctcccaaagtgctgggattacaggcatgagccaccatgcccggccttttatttgtttttttactttttttttcttaaattaaggaccaggcgtggtggctcatgcctgtaatcccatcactttaagaggccgaggtgggaagattgcttgagcctgggaggttgagtctgcagtgagctatgattgcatcactgcactccagcctgggtgacagagcaagactttgtctcaaacaaacaaaaaatttccgtatgaaaagcattcacatgtcaaaatatacaataaagttttcttactaagccatgcctcttcatccattggtattcctttctgcagacatacaggtaaccactgttagcagctgcacgtggcaaatacacgcagaagtggatctgtaccttcacccaccacccccgccaatttttttttgagacagggtcttgctctgtctcccacgctggagtgcaggggcaccatcatagctcactgcagccttgatcacctgggctcaaaagatcctccagcctcagcctcccgagtagctgggaccacagacttccaccaccatgcccagctagtttatttttatatatatatttatttatttatttttcttcctttttatttttaaattttattttattaattttttgagatggagttttgctctttcgcccaggctggagtaaagggatgtcatgatcttggctcactgcaacctccccccctgggttcaagtgattctcctgcctcagcctcccaagtagctgggattataggtgcctgccaccatgcctggctaatttttttttttttttgagacggactctcgctctgtcaccaggctggagtgcagtggtgccatcttggctcactgcaacctcaacctcccaggttcaagcgattctcctgccgagtagctgggattacaggcgagcgccagcatgcccagctaattttttttttttttttttttgtatttttagtagaagcggagtttctccatgtttgtcaggctagtctcgaactcctgacctcaaatgatccacctgcctcagcctcccaaagtgctgggattacaggcgtgagccaccaggcccggccttttttttaagatacagtttcactttgttgcctagtctggagtgcagtggtacgatcttggcttgctgcacccaggttcaagcaattctcatgtctcagcttcccgagtagcttggattacaggcacatgccaccgcggctggctaaagtttttttttttggagacggagtttcgcaattatcgtccaggctggagtgcagtggtgccatctgcagcctccacttctggggttgaagcgattctcccacctcagcctcccaagtagctgggactgtaggtgcctgataccacacctagctaatgtttgtatttttagtagatacagggtttcaccatgttggcctggctcgtcttgaactcctgacctcaggtgatccacccacctcaacctcccaaagtgttgggattataagcatgagccactgcacccagcctaatttttgtataatttttgtatatttttagtagagacaaggtttcaccaagttggccaggctggtctcagactcctgacctcaagtgatctgcccgcctcggcctcccaaagtgctggggttacaggcatgagccaccgtgcccggcccagaaatttctcatcctcccaaacttgtctccgtgcaacacccactccccgttgtccctcccccagcccctggcacccaccattctcctgtctctgtggatttgcctcttctggacatctcatggatatgagatcacatgatatttttccttttgtgactggcctgtttcgctgagcttgatgtcctcaaggttcattcatgccatacgtagcctgtgtcagaatgtccttcatggcaggcacggtagcacatgcctataatgccagcactttgggaggccaaggcgggcagatcacctgaggttgggaattcgagactagcctgaccaacacggagaaaccccatctctactaaaactacaaaaaaaaaaaaaaaaaattagccgggcatggtggcacatgcctgtaataccagctactcgggaggcttaggcaggagaatcacttgaacccaggaggcggagttgctgtgagctgagatcacgccattgcattccagcctgggcaacaagagcgaaactccatctcagaaaaaaaaaaggaagaacattctttttttttttttttttttttttttttttgagacagtgtctcactctgtcgcccagactgcagtgcagtggtgtgatctcggctcactgccacctctgcctcccagcctccagcgattctcctgcctcagcttcccaagtagctgggattacaggcgcctgccaccatgcccggctaatttttgtagttttagtagagatggggtttcaccatgttggccaggctggtcttgaactcctgacctcaggtgatccgcccgcctcgacctcccaaagtgctgggattacaggtgtgagccaccgtgcccagcctgttcttcctttttaaggctgaatcatattgtgttgtatggatacaccaagttttgttgatccattcaattgttgatggacacttgggttgtttccaccttttggctgttgtgcagaaccgtgccatgaccatgggtatgcaaatttcttttggagtctctgctttcacttctagtttccttttgaagccttatactgctttgtcgttggctgaaatggtaaggcagcagctgacctgtctctagctttccccattaccttgctgagtgtctgatatgcaactttgtaacaccctttcaggtgggatcgattattttctttttacgaacaaggacactgaggctgataatgggcctagggtcacccagcttgggagggacaggactgtgggtggaacccccagcctgctgtcaactgagtggctttagttctagcaaattcatctctctttaactaggatcagggtcaggagcctccaaggcagaggaggaggtagacttttgaggaatgttttgcccatgggcaaatgggaggggaggaggagataatactatttattttttatttatttatttttttgagaccaagtctcactttgttccccaggctggagaggagtggcaggatctcagctcactgcaaccttcacctcctgggttcaggtgattctcctgcctcagcctcccgagtagctgggattacaggcgtgcaccaccacacctaatttttgtatttttctgagagggtttcaccatgttggccaggctggtctcgaactcctgacctgaggtgatccacccacctcggtctcccaaagtgctgggattacaggcgtgagccactgggcccaacagaggagataatatgaatggttgtgttcacttagcaaagaagagcttacgatgtgccatttgctttatcagttttactcttttaagcctcatagcagccctaggaagtggtgggtactagcattctgcccgttttgcagaaggggaaactgaggtatagaggggtgaagccacacaactgaggttacactgctataaagtgaaggaactggtgtttgaatccatgctctctggtccccagtttagcagagaggaaggcaggagaagggaagaccaggacaggtgggtgtgggtgggggcgggatgagaggagacctgctgggctggcagagtctcaggctcagaacatggagaaaccctagatcctgaaaccccaaatcacccacttctgtgtttcttcttacatggacaaagaaaacgatgccagaagaagacccggccaccttggatgatcactcaggcaccactgccacccccagcaactccaggacccggaagaggcccacttccacgtcctcctcgcctgagacccccgaattcagcactttccgggcctgccagtgaggctgaggactgggggacccctctgtctccaggcattcgggggcctgaggtccctccagctacttctgggggggctctgtcagccactttctcagggaattggacagaggaaaggaaggggaaccctggccttgggattttcatcacagaggagtgggagaggggacacaggcatgggcctggcactatacagacaacaggaagttcccctctcgaccttcggctcctcaggaccaccagagaaggagatgtcaggaccccttcttgtcccccagctgggccataagacgtcccaggtctctgcacacccgtggaattcctcccttccccagtgggtttttgagcatagggtgcccttgggtgtgttgtgtgtctgcctgctggcttgcttaagttattaattataacacgggtcaaggtgttcccaggcctctatggagtggaatccttcaagctggggacctctggatcccatggttggatggctggggggtggagcgtgtctgaattcaccaaatttgaagcatctctcaagggcagtcagggtggtgtatgcggagcctcctgggggtgtggggagtgcagcagtgccatgccagggtctctgcaacggtacttgcattagagggtttaggaggtggaatgacaggggctacgggtgagggacatgaaggagaatgagggcccctcgcagtggctcacacctataatcccagcactttgggaggccgaggcagggggttgcttgagcccaggaggttgaggctgcagtaagctatgatggcaccactgcactctagcctgggcaacacagtgagaccctgtctcaaaaaacaaaaggggccgggcgcggtggctcatgcctgtaggcccagcactttgggatgccgaggcgggcggatcacctgaagtcaggagttcaagaccagcctgaccaacatggtgaaacctcgtctctactaaaaataaaaaattagctgggcgtggtagagcatgcctgtagtcccagctactcgggaggctgaggcaggagaatcacttgaacccgggaggcggaggttgcggtgagctgagatcgagccattgcactccagcctgggagacagagcgagactccgtctcaaagaaaaaaaaaaaaaaaaaaaaggaatgaggcgtaaatgaggtctagggaagagttaaagctggagtgctaggaagtggcccaagctcactgggtcgcccaaaagagatggggccacccaaaatgaagggggatgcagagagaagacgggtttgtgtggcgggagaggggccctgcgccgggccaggctggactcagcatcgttggaggaggggctgagagaggagggggtcaaaggatatcttgtgcgaaaggagacagtcaaacattaaggattaagaaggcaatgtgggcagagatgatggggaagggaggaggagcggtcgaatgtcggggaggggtcctttcaaccgggctcaggttgctcctggaggccagggctcatcggaaatcgtcggtgcgggggcggtggggggaagggttgggggcgaggcccgggcgctggccacgccctttcccccgcccattccccagagcggggcggctgacaaagcgagtccgggtgggagggcgcgggcaggcacgggggcggggcctcgtcgcggctgggccacgcctccctgagggctgcctcacaaagccgggcgggcccgggggggtggggcccagtctcaggggcgtgtccaggtcggggcagggaagccgcatcacgacgcgcggctgcttgtgtggggcggggtacagggcgtgtccacgcggccgagcaccgcccccgccgtccccgcaccgcctcactcgaaagcagccgttaatgaggcgccggcctgggggcggggcccaggcctccgaggggcgtgcccgcgcgcccgagcaccgcccccgacgtaccctcccgccccgcagttcccgggcggtggagccacctcacaaagcggcgaccgttctcgcggggcggggcgtagccggtcccgccccacggggtgccctctcgttcgctcgctagctccccgcgcccaggacggccggcagagggcgctgcgccacggggccgggccgcggcgacggtggcggcggcggcggcgaggcggcgcgtggccggcaggcggcgctgcccggctcggcctcggcctgcacggcggctgcggcggcggtagcggcagcggcggcggcggcggcggcggcggcggcggcggcggcggcggcggcggcagcggcggcggcctgggcccgggcgcagcggcggcggcggcggggcctggagccggatctaagatggcagcggcggcggcggcggtggggccgggcgcgggcggcgcggggtcggcggtcccgggcggcgcggggccctgcgctaccgtgtcggtgttccccggcgcccgcctcctcaccatcggcgacgcgaacggcgagatccagcggcacgcggagcagcaggcgctgcgcctcgaggtgcgcgccggcccggactcggcgggcatcgccctctacagccgtgagtacggggccccggggcaggcgcagggccggggctgctcacgaggccggcccggggcgggggccggcggggaggggccctgagcgcgggggcctggcgtggggtccccgggactgagccggtggcctgcagggagcgaccgtggagggccggtgccaggggacagacagagaaaagagggcgtgcgtggtggccggaggggcaaggtgcccagagtgagcaagggagcgcgaaatggggagtgaagggcctgagatttgggaggggtgggtgagcaggaagtggggggctctgagtggaaggggaatttggaggacgccaggcgtggtgggcttaagcgtgggggagggaggtccggggtgcgggagaggtgggcgtctcgggggcgggcgtggccgcctctgcagggaggagggtggggcgtgggcggcccgggatccctctggggaccccctggatagctcaggacggttggaaagtgtttgctggtctggggcgcccgcgagtaccgagttccaccgctgtgcgaggtgtggcgttcaggacccccgaatgggaaacttcaggatctggggagagggcccatgcggggacggtgggagccgcagggtgagctcctcgtggaaacgtggacgggacgggccccttcctgatgccgggcttcgaagtaagagctaacagcctcctcccatcttcttttgggggatgtgagaagctggttacattttccgaagctgctttcaaaactgacatttcactggggggaaaagaaaatcacaaatgcgtttgccagcaccccccacccccgctcccagtctttgtagttcattcttcttcttgttactccttcttatctcttctctttgattccttgttcacattttgctactctgtgtcatttggctttgtctttcagggcttcttgcactgatgccctggggaacccctcaggaggcctctagctagcttgggtcctgtgtgaattttttgccactttggaaacggcccgattaaaggaaagcccgaggagcagtccgttcacactgggttttccctgcacctcgactttgaaaacgtggactaaaggagttgtgtctgctgtccgagggtgccgtctctttttgctggtgcagagcctgggtcttcttggaccagatgagaggggaaggagggtatttcagcgggggtttcagagttcaaggcagacactcagctcaacagaaccccagatcataagcaaaacctattcactgggcaagcattggtagccaactttgtcctgaacagaacaaagcggggcagcgtttccaaaactagggtcccagggcttatcctcaaaggagttccaggagagttggctatcatttttaagtaaacctttaaaaaatttttttaggaccaggcggggtagctcagcactttgggaggctaagcactttgggaggatcacttgaggtcaggagttcgagaccagcctggccaacatggtgaaaccccgtctctactaaaaatacaaaacagcggggtgtggtgacatgtgcctgtcccagctactcgggaggcagaggcaggagaatcacttgaacctgggaggcagaggttgcaatgagctgagatcgtgccattgcactccagccggggagacagagtgagactccatctcaaaaaaaaaattttttttagaacaattttagtttagtttttttttttttttttttttttttttttttttgagacagagtcttgctcggtcccccaggctgaagtgcagtggctcaatctcggctcactgcaagctctgccacctgggttcacgccattctcctgcctcagcctcccgagtagctgggactacaggcgcctgccgccatgcccggctaattttttgtgtttttagtagagacggggtttcaccatgttagccaggatggtcttgatctcctgacctcgtgatccacccgccttggcctcccaaagtgctgggattacaggcatgagccaccccgcccggccagaacaattttagtcttatagatgtattggcaacatagtgagatgttcctaccatcttattcctggagtaacattttgtgtttgtatttgtgtttttgtttttgttttgttgatactcttgaaagtattacttgttattaagacagcacttctctttgagaggtaattggtaactgaaacattttttattattagagacaaggtttcactatgtcactgtgttgcccaggctggtctccaacttctgagctcaagtgatcttcctgcctcccagaatgctgggattacaggtgtgagccaccccacctgaccggaaacattcataaaaaggagaaagtccacattcctcagagagcctcagtcccagattcccagatgatatatccttagggttctgaaataatttttttttacacttttttgttttttttctttcttttttattttttttatttttattttttattttttcagacagggcctcactctgttgctcagactggagtgcagtggtacagtctcagtctcagctcactgcagccttccatggctaaagtgatcctcatacctcagcctccctagtagctgggaccacaggcatgtgccacacccagctaatctttcatattttttgtagagaaagggttttcactgtgttggccaggctggtctcaaactcctgggctcaagtgatcctccctccttggcctcccacagtcctggaattacaggcatgagccaccgcaccgccctctttatccttaagtaacattgatatggagataaaaaacatgggttcttggccaggcgtggtggctcacacctgtaatcccagcactttgagaggttgaggcaggcgaatcacttgaggtcaggaggttgagaccagcttggccaacatggcaaaatctcgtctctgctaaaaatgcaaaaattagccaggtgtggtggtacctgcgactgtagtcccagctactccggaggatgaggtgggaggatcgcttgaaccagggaagcagaggttacagtgagctgagattgcaccactgcatgtcagcctgggtgacagagcaagaccctgtctgaaaaaaaaaaaaaaagcatgggttctggagttggaggtgatcagtgctgggtgtattaatttcccatggctgcaataacaaattatgacagatttttggtttaagacaacaggaatggattctctctcagttcatggtcagaagtctgaaatcatggtactggcagggccacaatccctggagaggttctacaggaaaatccttgcatcttccagattgcagtggatccagctgttgcttgatttgcagcagcgaaacccaagtccctgcgtctgtcttcactcctgtgtcttgtgtcctcttttttccttttttttttaaagtgagatggagtctcgccgtgttataggctggtctcgaactcctaggctcaagtgatcctcccacctcagctgttcttttcttttctttttttttttgagacggagtctggctctgtcacccaggctgaagtgcaattgcgcgatctccgcttactgcaagctctgcctcctgggttcaggccattctcctgcctcagcctcccgggtagctgggactacaggcgcccgccaccacgcccggctaattctttgtatttttagtagagacggggtttcaccgtgttagccaggatggtctccatctcctgacctcgtgatctgcccaccttggcctcccaaagtgctgggattacaggcttgagccaccgtgcccggccccagctgttcttttcttataaggacactgggcattggatttagggcccactttatatctaggatgatctcatctcaagatccttatctgcaaagaccctatttcctaataaggtcaccttcacagattccaggggttacaacttggatgtctgtcttttttttttttttgagatggaattttgcccaggctggagtgcaatggcgtgatctcggctcactgcaacctctgcctcccgggttcgagcgattcgcctgctttggcctcccaaagtcctgggattacagggattagaggcatgtgccaccatgcccggttaattttttttgtatttttagtagagatggggtttctccgtgttggtcaggctggtctcgaactcctgacctcaggtgatccgcccaccttggcctcctaaagtgctgggattacaggtgtgagccaccgccaccagcctcacatatggctaatttttaagtttcttctagcgatgcggtctcactattttgcccaggctggtcttgaactcctgggctcaagcagtcctcctgccttggcctcccaaagtgctaggattacagacgtgagccactgcgcccggccaataaatatttatgtccatgttactgacagcagtgttcgttggtgtggcatgggaatgagctagcttttctaggaggagccccctatgctccagggctgccccgctgtcttggctcaccggccatgggagggagtcctgggccatgatctgtacctaacataggaggcccaggagaggcacgtggggaggacttccagccctgttccttgacgtctgcaccctccaggggaaggatgacagctgcagaagggcctgtctctgtcactctgtagtgaacagttacttcttgccatctgaagtcaccctggcctacgtccatgagattggccaaatggcaactaccaacaccaggccattttccctgtgcagagggggaggccctttggcgtgggcttcctgggcttgaggaagctttggcatggcctctggagttcctgggcataggctgccctcccttggaaaggaggcagtttctcagggaggggtgccgggaaagagaacagaacaaactctcacttccccagccctgtggcgctctttctggaaatgactgtgtcacttttctttcttggtcagcacgagtcagtgtggccagtgctttagactctcccatccccttggctcagaagcttacacagcagcatgggctccgtcaggggctaaacttcagtttgtgaggggcatgccatggggtggaaagttcagagaaaaaccctttgtccaaagaaggtgaagaatggcctgctgtcaccgaaccaggggcccttgtgacttcctttggttacactcctgggatccccctgacagctggggcaggggtatagaagagcttgttatgtgccccatctttaggacatctcggtgtcaagctggagtgacaacagggaaagttagtaaccccagaaaggcatttgtgtttcagcggtgcctgcgtgtggctaatggataccgtcatttattgagcatttatcccgtaccagactgtgcataaacttgtgttgactcaaaatgcttgaccttgggggcagctagggaaagggcagtgatataaattaggcctatgggccacattgagcctgtggcctatttttatctgtgtttgtattttattagtgagacagagtctcactgtgttgcccaggctggagtgcaatggcatggtcttggctcactgtaacctccacctcccaggttcaagtgattctcatgcctcaccctcctgagtagctgggattacaggcctgtgccaccaccctggctaatttttgtatttttagtagagacagggtttcaccatcttggccaggctggcctcgaactcctgacctcaaataatctgcctgcctcagcctcccaaaatgctgggattacaggtgcgagccaccgcacccagcctgtgttttattatttatttattttgagatggaatctcgctctgttgcccaggctggaatgcagtggcgcaatctcggctcactgcaacctctgcctcccaggttcaagcgattctcctgtctcagcctcccgagtagctgggattacaggcacatgccgccatgcccagctaattttttgtattttagtagctcactgcagcctctaactcctgggctcaagtgatcctctggcctcatcctcccaagtagctgggactacaagcacatgtcaccacccttggctaatttaagcaatttttttagagacagagtcttgctgtgtttcccaggctggccccaaacccctggcctcaaaccatcctcctcctgcctgagcctcagaagtagctgggattatagtcacgaaccgctgggcccggtgtggcctatttttgtacagacaaagctaagaaaggcttttacagtttttgagagattgattagggaaaaaaactaaaacccaatccacaaacaacaataatcagttgagaccacagtgtcctgcaaaacctgaaatatttactcactggcccgaggcaggggaagcttgtagacccctgggataaatgaatgaggcaggcaggagttggggtctgtggggagtttggccccagccaaaagagaaaccaaaaaatcctcaggccgaatagagcatacttctgaattgtgtgagccccttgtgccaattgtggcgcttactgtatgttaccacttactctgaaaagagttctgtgaggtcagagataccaaccccaatttactggtggaaaaacagaaatgaaagaacttgactggccaaagtgatgtggttggcaggcagcagagatggctttggcattctgggtgactggatgcccaccttaaatgcatatataagtggttcagtgacatttatctgttcatcacaaagacccaaagtagcagaggcttaattaaacacgatggcattttattttttgtgctctaatgctaaagtgtgaagattgtcaggtgccaaagtctcctgggctcttggaagttcccagatccaggtcctccccccggctttttttttttttttgagatggtgtctcgctctgttgcccaggggctgcagtgcagtggtgtgatctcagctcactgcatcctctgcctcccgggttcaagcgattctcctgcctcagcctcccaagtatctgggactacaggcgtgtgccaccacggctggctaatttttgtatttttagtagagacggggtatcgccacgttggccaggctgttctcaaactcctgacctcaggtgatccacccgcctcggcctcccaaagtgctgggattacaggccactgccccaggctgatcctccaccattcttaaggtgaggtcttgtcctcaggtttcagcatgactgctggagtcccgccattacaccctggcttccagacagcaggacagaggaagggacaaaggagaaagggtgcaaaggtcacatccaggtgtttgttaagaaaggttcccggtagctgatgcaaggtgcttcagctttcattttgttggctagaatgtagtcacatgatcactgccagctgcaagggatgctgggaaatgtagttttcaatctgagcggccatgtgctcagctgaatttagggttccagtttccatggacaaagagagaacatacagggagtcaccttggccacagtgggtaggatctggacctggccagaatgttgggaaggacgtttctgggttatggagaggtgctccagtgggccagggctggagacagccacctggcttggagcacagggtcccctgtgaggagtggaggggctaaaagtggaaacagggctgggttggaatcgaggatttttttggtttttttggagatgaattctcgccctgtcacccaggctggagcacagtggctcaatgtcatctcactgcaacctctagcctcccaggttcaagtcattctcctgcatcagactcccaagtagctaggattataagtgcgtgcaaccacacccagataatttttgtatttttagtagatacgggggtctcacccttttggccaggctggtcttgaactcctgacctcaagtgatccatctgccttggcctcccaaagtcctaggattaccggcatgagtcaccgcacccagcctcaggtgaaatcttaatggaaggtgtccagtgctgtgagcagctcctggtcaccaagcactggccctctgtgtagggggtctggatgagatgggtgggcaaggcctttcaacagaagctggagtgtggtgtgaacttgctaatgactttgagatgccaagcctcacacacctcagaccaggttggatttagcaggtggagaggctcaggaagacctctgtggcaggtgtgtctcctttctgcggaaacctgctgcttctaaggtctgctggagaacctgggaggtggtgagtttgcaaagacatccagggaagcagccacttaagcgagggcaggatggaggggcccacctgggccacacctggctgcttgaggtggcgagttgaggctgggaggggtttccatcagttccatcagctcagagctaggatttttttttcttctttttttgagacagggtcttgctgtgtcacccaggctggagtgcagtgacacgatcatagctcattgcagccttgaacacccaggctcaagggattctccctccctcagcctctctacaggctgggaccacaggcgcacatcaccatgcctggctaatttttttttttttttttttttgtagagacagggtctcactatgttgctcaggcggatgtggaactcctgggctcaagcgattctcctaccttggcccccaaagtgctgggattacaggtgtgagtcatggcagccacggctccagagctcgggttcttaatctggtctgtggatggcccctgggggcggtcccatgagcccctcacaattggacacagttttgcaaaggggtaaaaggacaagaatcggtagctgtgactgtggatgagcctctgagcttcactttccctccctgaaagggggtgacagtggcacctccctggaggttttcgtggaggggaggaaacacatgtaaaatacttcaccccagttgggcacagaggctcatgcctgtaatcccaggttttgggaggccgaggcagcagggcggtttgagtccaggaatttacaaccagcccgggaaacacagtgaaactgtatctcttaaaaaataatttaaaaaaattagccggcatggtggcacatgcctctagtcccagctattccagaggctgaggcgggaggattgcttgagcccagaagcttgaggctacattgagccataatcgtaccactgcactccatcccgggaaacagggcaagaccttgtctctaaaaaaaaatgcttcttgcttgatgacttgtgatatatgaaaaggaagaaagaaaagaaaagctttgccctgtgtgcctggcccgaagtaagtgctccataaattggccgtggtgtagctgtggattctctgcacatttttctgtgcagaacctcccctgatttcggtcagcttctcagaaggatctgtgactgaaaaagggtaccagttcctggaggacagcacctgattggggagtggagtctgccctggctggtaagggattgggggctctctgcgcagggccaggacatctctccagggacaggcgagaagctttgaaagggcaggaaggagagggcagcaaggtcagatgccgtgagaggtcagagtgagagccaaggggcggtcactggatttctgagcaggaggtcacaggtgacctcagagagcagtcccctggagggctggggtgggggaggggccagccagatggcaggtcttgggggaggtgacagtggagctgcagagagagcaggggggacggtgacctttcccagcccactgagacccactctttcattcattcagccagaaacaggcagcgaaagtggactcgccgtctccatagtgcggtagctcccatccagccagcttgaaatggtcagcagaaattcaccaagcgtctgctgtgcaccagttactgttttaggagcccagggatgtggtgacacccgagataaacacaaggtcccacatttgcaggcctggggacattgtctgaggagcgctaaatcagcaatcacttaaaacaagctgaggggctccaggatgctgggggaggggctctgcttagagggaggctgagggcagagtcgtgcttgtggtaagagctctagcaggggccagctggcaagtcctgatccactccttagcatcccggtgaccactttgtgcctcagtttccttggctgtcagttgtggatcttgacatcgtctaccctagagggttgttgtgagtggcgagctgatagaagtaaagtgcttaaaatagcgtctggcactgcaggagggaagacctcctctgggaatgaacttgtgggcctggcatggccaagggcatgcagtgggggggatggggaggcaagggacgcctgtgatggaggctgggctccagccatgctgtggcccgctgtgctttcctggcggggcgatcatgggcaaatgcctcagtgtccccgaatctcagcttccttattggtgggaggattcggtgagtggcttccctggtggaaagtggccttggccagagtagacatctgtggctggactgtatacagagccctgcccaagtcggacacagccccccaatctccagtgcactctgtctttttttttttttttttttttttttgagacagggtctcactctgtcgcccaggctggaatacagtggagcgatttctgctcattgcaacctccgcctcccaggttcaagtgattcttgtgcctcagcctcctgagtctctgggactataggcatgtgacaccatgcccggctaatttttgtgtttttagtagagacggggtttcaccatgttagccaggctggcctcgaactcctaacctcaagtggatctgcccgccttggtctcccaaagtgctgggattgcagacatgagccaccgtgcccgacctcagtcttggggagcagagagaaggcagacagagaaccccatctcctctgctggggaagtggtctagggagcaccttgaagagaatggcagctaaggagaggtaggggagaggctggcctggccagagagaggtgagctgcaaaggagggggacccaggggcctgcagggtgtctgtggtcagccctgctactctctgcctttcctggctggaatgctatccctggcctcccagcactctctgggttagaggctgcaggcggtcctgattagcacacatgggagcctcaccttgggaccttgtccagggaaccgtggttctccctccagtttcctcccattaaatggagggggctttcgaggattggcccacacccaacataggtgaatccttggtctcctgagcctgctatgtggcctggaagagaagatgtatcccaagttgtccaggtgtgggggtaggtaggacacagagtagccctgggaatcctgcccaagaccccctcgtccccagtgattgaggaggagtccctttccccggtgtagtttatctgtcccaggggccttctccggcaccctctggatctgcttcctgatctcactctggggaactgcttggggagcttcacgtttcagtctcaaggatcgcgcagggcggaccctcagcagcctccagatctgcccagaaagtccacggtgccggccctgccacttctttgtttggcttaagagacagggtcttgctgtgttcctcaggccggcgtgcagtggtgcgatcatagctcactgttagccttgaaatcctgggctcaagcaatcctcctgccttagcctcctgagtagctgggactacaggtatgcgccaccacggctggctaattttttaaaaaaattggctgggagtggtggctcacgcctgtaatcccagcactttgggaggctgaggcaggtgaatcacttgaggtcaggagttcaagaccagcctggccaacatggtgaaaccccatctctactaaaaatacaaaaattagctgggcgcggtggtgtgcgcctgtaatcccagctacttgggaggctgaggcaggagaatcacttgaacccaggaggcggaggttgcagtgagccaagatcatgccactgcactccggcctgggtgacagagcgagactctgtttttttttttttttttcgttttttgttttttgtttttttaattacgggccaggtgcagtggctcacacctgtaatcccagcactttgggaggccgaggtgggcggatcacttgaggtcaggagttcgagaccagcctgaccaatgtggagaccccttctctactaaaaacacaaaaattatccaggcatggtggcgcatgcctgtaatcccagttactctggaggctgaggcaggagaatctcttgaacccaggagatggaggttgtggtgaccacagatcacacaactgcactccagcctggtcaacaagagcaaaactccgtctcaaaaaaaaaaaaaaacaaaaagacatagagatgggctctctagtatgttgtccaggccggtctcaaactcctggacataagcagtcctcccctccttggcctcccaaagatctaggattacaggcctgagtcactgtgcccagcccaacctgccactttgacactacacagctctgacttttggttgaagaatctggagtccccagttgccccccctccccctgtgcttgcctttgttccccaaaaagcagttacatgaaggaaatggagaccaggcctaacccagggctgaaggagttgggtctggagattctaggcccctcctgtgtctcctctggtgttgattctctgcatcgcttctttattttattatttttttttgagactgagtcttgctctgtcccccaggctggagtgcagtagcgtgatctcagctcactgcaacctccgcctcccgggttcaagcgattctcctccctcagcctcccgagtagctgggatcatagacacgtgccaccacgcctgcctaatttttggatttttagtagagacggggtttcacccatgttggccaggttggtctcaaactcctgacctcaggtgatccaccagccttggcctcccaaagtgctgggattacagacgtgagccatcatgcctggccgcttatttattttaattgttgtttagtcagtacacacacatgcccaggccttagttctgtttgatgcttttgacaattatggacacccatgtcaccaccacccaaagccagacatggaacttgttcccctctgggtaggtttgttcagtgggacagcccctctttccctgtctgttcctctcatcatttgtcccctgctgccaggcggggcattcttgtaaacaggtccagactgggtttggggggctctgtgcccccccacccctgccaggagaacccccttttattcttcctttttgtctgtctctttaaagcgattcattagccttggcaggcgtgggtctgagctgttttcctttatgtcgttggcaggtctttctcccgctaattgtgttctcggagctggggttcatttttgccggatgtgttacacatgtgcaagcgtagtggttttatgtatagaaaacctgcccagcggtgtgggcatgggtgctactcctggcgaggactgcagaaaggcccctggccaatcagtgctctcgtgaaagagggatgctcttgttaaccatcccgggcagggggcatgtgaataaataatcaaagactggggtgcctcttgcagactgagggagggacattccagagaatttgctgcattcttccttgaacaggacgggaaggcgaagataggctggagcttccagatttccatcctgtgcccttgagggaccctctgcaggagcctggctctgcctttgagccctggagcccctagatgcaggatgatgggatgcctggctcttactcccgctcacacactccaagtctcgctatcaggacagccccccacagggagccacagcagccacagctcactccctcattttttttttttttttttttttttttgagacagggagtgcagcggtgtgaacacagctcattgcaacctcaacctcccaggttcagttcatgctcctgcctcagcctcccgagtagctgggacggcaggtggccccacacctggctaatttttttctttctttctttctttttttttttttttttgaaatggagtttcactcttgttgcccaggctggagtgcgatggtgtgatctcagctcaccacaacctccacctcctgggttcaagtgattgtcctgcctcagcctccccagtagctgggattacgggcatgcgccaccacgcccggctaattgtgtatttttagtagagacgggttttctccatgttggtcaggctggtttcgaactcctgacctcaggtgatccacccgcctcagcctcccagcctgtagctgggattacaggcgtgagccaccgtgcccggcctaatttttgtatttcttgtagagacggggtctcaaccatgttgcctaggatgctctccaactcctgggctcatgcagtcctcccacctcgaccacccaaagtgctgggattacaggcgtgagtcaccatgccccgccccctccctcatttttatcttttatctttttttttcttttttagagatgggggctgggtgcggtggctcacgcctgtaatcccagcactttgggaggctgaggcaggtggatcacaaggtcaggagttcaagaccagcctggccaagatggtgaaaccccatccctactaaaaaatacaaaaaaaatttagccgggtgcagtggcaggcacctgtaatctcagttactctggaggctgaggcaggagaatcacttgaacctgggcagcaggagttgcagcaagccgaggtcgctccactgcactccagcctggatgatagaatgagattccatctcaaaaaaaaaaaatggggtctcaatattttgcccacgctggtctcaaactcctggcttcaaatgatcctcttgcctcagcctctcaagtagctgggcctcctgcctcagcattctgaggagctgggcctcctgcctcggtgtcccgaggagctgggcctcctgcctcggtgtcctgaggagctgggactgcaggggggcaccaccatgcccagctcactccctaatttgtataagaggaaactgaggcactaaaactttggtggcagagttgggatgtgaacccaggtttggccctgatccgttcacttggccatcagccctgcagcccctcctgccacttttcccactctctgactcctccacagggcagtgcaaggccatggaggaagtgcctgcccaaggcttacccctgctgctcctggtccttgtcctgtgtcaccgtgttggccatagcgacctcttccagagctcgccaaagccagggtcccgtctcccctggttcctgccgtgtgcctgatttctttgtggcatcagtagtgtctgcccccttcgcctgtgccacatctggaatcacatctggcgaagcagcctgcaggtcctggggcggaaggcggccttcctaacccaaacatactgttctctgagccttggtggggccagaagggctcctggagcgccctgggacctggcagagggccttcctgcagctttgtggcccaggacatcctgtgtctctggctgatggtcaaaacctttccttattctttatttttttttaaatgttttactttttgtagaagcagggtcttgctttgtcacccaggctggtctcaaactcgtggtcccaagccatctctctgccttggcctcccaaagcactgggattacaggcatgtgccagcatgctctgactcagactctttcaagaggtgcactaggcagggacttcaagtgggcctcagccccagggcagcttctccctgacccaacttcgatttcctccattggaggctgcctccgctccagcctctctggagcgcccccctgtactcccctcctctgggtgaggcccttttgccagcctgaaggcaggccccagcccagcttgctgcactgagctctctgtccttggcaatgagagccagggtgtggagggtcccagtcgctctgggagatgatccccctcagcagcctggggtcttcttgccgctccatgacacgcctcattcagcccgaccttccaggccactgtgggtgtctcctctgcaaagggcctcctgctggcctagtccccatagagagctgcagcccagctcctgccatgtgtcacaatgtgacagaccctctttagcaccaggaagcaggcttgattgcctccttgtagtggtgaggctcaggggtcaactagcctggcctggcattgcccaggcccagagcacaggtagaacctggggtcccctgagcgtggcccccagtacctcccagctggctctctggaggctgggatggaatttggctgtctttggaccagcttctgggtccccagctgagccacctggagactgtcatcgctctgttgcttggtttcccctcttaaaaataggactaaggtcgacctggagggtggtttgagcactaaccgaggccctgcacagccaacacctaagagtgcttcctggggctccataaatcacagcttcaaagtcttggcccgcgggagaagaaagactgggcgagctggcccagcagacagcatgtggagcgagggggctggtgcaggccggttttgtggctttgcaccgcgcccccaccccctaccctccacaaccccatgcttttcataattatccactaagctcccgcgctttctggggctgtggaaccccagctcacatctgctgtctcttttgtagtgcacaaagccccaggcggtggcagctgattagcatggatgcaggagacatttgcatgtaatagctcccagtgaagggggtgccccgtctctttttcagaaaagccaagctctttgtcttggccttctattcttggggttgcccttcgcacaccccacaactgagcagactgtcacccacaggtcaggactacaggggaagctgtcgacccttgaaggtggagcttagggaccagaccttagagggagccccctactgagtgccccccaggcctctgactgaagaagcttcacagtgatttatgaggtttgggtgtcctcagttcagggggctttctccagagcccacctagatggggcacgcattgagtgctctgtctcctgagatctgacctggcagtctggggcagggggaaagggcagctgccccaagtagtgcttgggggcaccatggaggccttggcctacctgagatgccaacaggacacccacagacacctctgttccgtaggtggctgcctctcagccctgcccatacaccacccagtgtcctgtcactgcgcaatttgagaatttttttttttttttttgagacagagtctccctttgtcacccaggctggagtgcaatggtgcaatctcggctcactgcaacctccgcctccccagttcaaaggattcttctgcctcagcctcccaagtagctgggattacaggtgttcaccaccatgcccggctaatttttttttttttttttttgtatttttagtagagacggggtttctccaagttggccaggctggtctcgaactcctggcctcaggtgatccgcctgcctcagcctcccaaagtgctgggattacaggcgtgagctaccatgcctggcccagaattgtttattaccttctgtaatcctacattcttggggactcctgaagtagattcaacactttgactttgtgagttgccaatgcatttccaagcccggatccaaccgtggaccctggccttttgggccagcagaagaggtggctgttttttctcatgaaatatttttgaaggaatgaagacgaatgcagccaacacctgtgcacttcccaccctcattttaaggaaaccttgcccatggaatgaagccccccatccaatcccctccccagggaacagctttatactaactctggtggtcggcttttggaggggccataaatggcctgaaaagctaacctgtaacctgtaaagcttaaactttacaggtgggatgtaaatgttgaggcgggaggatcgcctaaggctgggagtttgagaccagcgtgggcaacatagcaagaccccatctctacagaaaaataaaaaattagccttccatggtggtgcatgcaagcctggggtcccaggtactcaggtggctgaggcaggtggattgcttgagcccaggagtttgagaccagcctgggcaacatagggagaccctgtctctacaaaaaatataaaaattaggtggtttttttgttttttgttttgtttgtttttttttttttttgagacagagtttcgctcttgttgtccaggctggagtgcagtggcgcgatcttggctcactgcaacctccgcctcccgggttcaagtgattctcctgtcttagcctcccaagtagctgggattacaggcgcccaccactacacctggctaatttttgtatttttagtagagatggggttttaccatgttggccagactggtttcaaactcctgacctcgggtgatccacctgcctcggcctcccaaagtgctgggattacaggtgtgagccaccccaccgcgcctagcctaaaaattagttttgtgtggtggtacatacctgtggtcccagctactttgttttatttacatatatatatgtatatgtatatacgtatatatgtgtatacgtatatacatatatacacacatatatacacacacatatatacacatgaatatatagacacatatatacacatgcatatacacacacacatatacacacacacatatatatatatatatatatatttttttttttttttttttttttttcttggtatagctctatccttcctgaagtcccagctccttaggaggcggaggtgggaggattgcttcttgagcacaggaggtcgaggctgcagtgtgctatgactgggcgggccattgcactccagcctgggtgacagagggagaccaaaactgagtcagtgttcccaagcagtgtgtgaagctgattctctgtcagccacgtgccagatgggttgggtcccaggggtggccacctgggggacagggccagacacttgttctgggcccaatatggccttgtgtccagaactctctcggtggctccttctctcgaccctttgccttgagccggagcactgtggggacacaggaaccaagactggtgttttgtgccaatgccacactactgtgtgcccgtgggtcttgggccgggcatgggtgggttcgtcctcatggctacacagtgaaccatgtgttattttatttttctagacactaaagctgaggtgtcgggaggtgatggtcccttgcttgcaggtggcagagctcaggttcaaacctggatcttactgcacctggctcgtttgggaggcctcccttgctggaatgcaggtcagggagccccgatgcccttgggctgactgccccacgtccatcacacccactgagggccgtggggtgggtgcagggcttgttctgggagattccaagctgaggaaagcagggctgtccgccagcctccagctgggtcacagaagaggctcagggcctgttcccactcccctcccccagccagcagggtccaaaaggatgttgggggggtggtccccagtccggcctgcccactctagggaggggcccagataacttgcgtagacgccggccctcccgcccccagccttcgccattgccttttgtctggctatctttcatgtacaagggagaaattcaagccactcaggagggtgtaacatgaaaagtcagtctctccttctctccgcactgcccgtgacctgtggtttctcaggcacatacaagcgcgcacgcataaatctctcctccaacctgctgggcttcaagttatgcacgttcacacaatggcaaaggagggtgcggattgaaaagtatgacttgcttcccggaggcagcactgaagtcactttattgtgtttccagacaagccccatgaatgcagtgtgcactgcccctcctccctctgtcccttccccgcccatctgtacacctgtggtgcgtaggttttacaccactctgtgccttacgttgtggctcgatcatttaacatgtcagtgtgtaccgatggaaattgatctcttttaatttgccacatcttcatttattcattctttgattaattgatggatatttaggttttctgctttgggggcattcagatccaggtgtatctctgcaagtagagcttgtagcatacataaggccctgcaaagggatttctgggccggaagtttttgatcagttgctcagacatagttctgatgtgctggggaagtgcccgttcagggccatggctgcagggctcctggacacccagctccggtgctggagtggggttgggattcgcccagaggccagggctgcgccagaggagcccagggtgacctcatggtcctcagatacccggggctgggcagcacagtggaacagctgctccagagcttctccgaggacgacatcggaggatccgactcaggttacggcaggagagggaggccaggccgggttagggttctggggtttgggattctcttccgaggctggcattgatctgttgctgatgatggtaacagcagctgctcttgtttatgaagtacttaacacctccagctccctccattacctaggaatcctcactgcagggaggggttttcatccccattttgtgcctattttatttatattattttattttttgaggcagggttttgctcttgttgcccaggctggagtgctatggcacgatttctgctcactgcaacctctgcctcctgggttgaagtgattctgctgcctcagcctcttgagtagctgggattacaggtgcccgccaccatgtctggctaattttttgtatttttcggtaaagatggggtttcaccatgttggccaggctggtctcaaactcctgacctcaggtgatccacccgcctcagcctcccaaagtggtgggattacaggcgtgagccaacactcccggccctgcccattttatttatttatttttatttttatttttttcagatggagctttgctctttttgcccaggttggagtggaatgcaacctctgcctcccaggttcaagtgattctcctgccttagcctcccgagttgctgggattacaggcatgtaccaccatgcctggctaattttatattttgagtagagacggggtttcaccatgttggccaggctggtctcgagctcctgacctcacatgatccacctgcttcggcctcccatagtgctgggattacaggcgtgagccactgcccccactgtgcctattttatttcattttgagacagagtcttactctctcccccaggttggagtgcagtggtgcgatctcggctcactgcaacctccacctcctggcttcaagtgattctcctgcctcagcctcctgagtagctgggactacaggcacccgctaccacgcccggctaattttttttatttttagtagagataggttttcaccgtgttagccaggatggtctcgatctcctgaccttgtgacccgcctgccttggcctcccaaagggctgagattacaggcgtgagccaccgccccctgtcattgtgcccattttatagatggggctcctgaggccaggggtgaaggcaggtgctagttcgggggatccaagccctgccagactctgctgcatgtgggctctgacctagtgaagttccaggatggtgccctggggccgggctgtcaggccctccacgtgggttatgtcacctcaccctttgggatgtgtcagggtggtggttgaacagatgaggaagccaaggccagggctggagaacagtgggttcggccctgaacccagtccctccttgataaacctaagtcctccttgatgccaaagcccatcctttcagccatctccctgctgggtgaccctagggtcatctctgccgcctcttgggcacatgggtgccaagccacacaggaatggggggaagcttctggttcccagtttggaaacaaggtcacctctgccagggcagtggggcctggctcaggtgtcgcctcctcccgagtctgcctggaatctgaattgggcctggtccgcatgcatcagcttccgtgctttccctcctctcagcgcttactgccagttcctgttgtccgtctcctcactgccctgctgggtgctgtctgcctcccactgtggactcccagcatgggagggccgggggtggctctctggttcaccgccaggtcctctgtgcctgcatgtggtccgggcagagcaggctgagcagagatgccagctgagtgggcttcagaaagcgtgtttttttttccgtgcctgtgggatgggagttggccacggggggtcggggtgtctccctctttttacctaactctcctcctttgatcgggaatattttcctctggaaggtgaagagcccatgttgtctttggcagcaggaggcgatttaatacaagacgtaccatttggacaacggcttctacagctaccagctactcccccgccccaggtttgccgagataaatagctttaattattcctccatttggtggctacagttgtgttccccctggagatgcaagagcttgaaatgtggcctttctcccccgagctgctgctgcttttcttcttgccctccacctccttgtgttttttttttttttctctctctctctttttttttttcttcttgaaatggggtctcactctgtcgcccaggctggagtgcagtggcacgatctcagctcactgcagccttgacctcccaggctcaagggattttcctgccacaacttcccacatggttgggactacaggtgcgcatcaccatgcccagctaatttttttattattatttgtagaagatggggtctcactgtgttacccaggctggtctcaaactcctgggctcaagtgatcctccccgctcagctttccaaagtgttaggattacaggcgggagccactgttcccagccggcctccttattctctatctgccaaagaatgtggccctgatgtcacgacagcatgggaggttctctttttttttctttttgagagagtctcgctctatcacccaggctggagggcagtggcgtgatttctgctcactgcaacctccgcctcccaggttcaaattattctcgtgcctcagcctcccaagtagctgggattacaggtgcccaccaccactcctggctgatttttgtatttttggtagagatgaggtttcaccatgttggccggactagtctcaaactcctggcctcaagcgatccacgtgccttggcctcccaaagtgctgggattacaggcgcaagccactgtgcctggcctagggatgggaggtttgaagggactccaggtccccctgacccaggtctaacgagcctcaagggcccaaagaccccctgcttgttccgttgctttctggaagcaagggggaggggaaggaggtgaacaaatagtgctgctgtgtggccacctgatgctaaacatctctgcgtggtgaagccacttccccaatcaaggccatgcgcacagtgagggcaggctagcactccaacttggacacctagacccctgaacccactgccccctgtgcttagggaagaggctgggctgcccctgcccctatcccggggagggcattctggtcagtacccatgagtgccccttgtgtgctaggtactgtgtgggtcatgcccagagccctggatctgcgctttgtggggctgtcaggtaggcattaaataatgagctgccaggcagtgagggcttgtccgggaaatgctggaggacctctaggaggaggtgacaaggaagcaggggaagaggggagggtgatctctaaggagcatcagaggccagagagaacctctgcccatgatcttgaccgggagagagtgttgaaggccagcgaggtttggctggagtgacccagggggcagcagtgagactgcagacattggcagggggctggttccggaaggtgctggggaaccgtggggcggtgtgaagcaggcgggttgtgttagacactgtgcggcttgaagggtggactgggaggtgactgaggcatggtatgtcgcccggcaccatctgctcagtgagacccttgagagacgtctccccgttcttccaagaccctcctgcatgctgggacccagggctgccgtggagctgcttgctgccccacccaccattctctagtgtattttcttcaagtctggggctagggaatccttataccttagagtcccccagattctgctgccctggggggccaataaggaggggatgtgcagcatgctgactctaaggcaggtggggaacagcagccagtccaccaagagctgccctcttccccatccccattgcctcctgcctggccagccatagcacttggctccttccctatcctgtgtgacggtgggtctctccccaccctgcgcaagatccctcccagtgctgcccagagccaagccaccagtccactggggcctcttgcagtccctccacagcgcccctacccacatcaacccacgtttcttggaggtctgtcccagtagcctcccagggctcaccacactgtctgggccacccctgtttccctgcgttcctgcactcttccccttactggcatatctgtccccagtctccttcccaggctgggtcaggtgccacctccaggcacctacagagtccaccacttggggatctctgtcagtctgccactcggctgtcctcaccgcctctaggatggggagtgtgtctccattgccgagtgcctagtgagcagatagggaagtgggtggcgaggatgctgagggtccagcctctgctctgcacctgtaatccttccgggttttgcaaatgaagctttatgggcacacagccatgctcatttgtttacatattgtctgctgcaaggcagaatagaatcattgtagcagagatcagattccccagcagagatcagattccccaggaagcacacaatatttactgtctggtcctttacacagaaagtcagccaaggcctgctctaggaagcgcagagacattgggtggtgcattggtgaggaatagggatgctggtgccagtcacctcggccactcttgctgtgtgaccttgagcaagacacttaacctctctgagcaaataagggcatagtgagagtagatactcccagaagtgatgagaagaggaaacaggaggtcgacataaggcaccggaacagagcctggctgttagagtgttgtcactcttatgtcatgtgacatcccagcctctgcagggtgtgggcaggcctggctcatggcagctgggggtttgtgacctggattcacatggtggagggctgcttcctgggaagcaagaaaggctgcctcaaagatggggcaatttttctacccccttccctgcagttccagcccctcctcccttggccccagagcttcatcagggccgactgcagtgtggcaggccagcgagtagccccaggctgggtccaggggtggccaaagcgtaacactcagtccgggtttgtgttctttacgttccccgttggagactccacctggagatcccagtccctttccttttactgcagggtaaagaaatgctagctctgggccgggcacggtggctcacaccggtgatctcagcactttgggaggtcgaggtgggtgaatcacctgagatcaggagtttgagatcagcctggtcaacgaggtgaaaccctgtctctaggctggatgcggtggctcactcctgtaatcccagcactttgggaggctgaggcaggcggatcacgaggtcaggagatcgagaccatcctggctaacacggtgaaaccccgtctctacaaaaaatacaaaaaaaattagccgggcgaggtggcgggcgcctgtagtcccagctactcgggaggctgaggcaggagaatggcgtgaaccccagggagtggagcctgcagtgagccaagattgcgccactgcactccagcctgggagacagcgagactccgtctcaaaaaaaagaaaaaaaaaaaaagaaaccctgtctctaataaaaatacaaaaattagccaggtgtggtggtgcatgcctgtaatcccagctactcgggaggctgagacaggagaatcgctggaacctgggagatggaggttacggtgagctgagattttgccactgcactccagtctaggcgacagagtgagacttagtctcaaaaaaaaaagataccccagctgtggcctggcctcaattggcctgaactcaccacggcctcctggctctagagtctgctttttggtcacccttgcctgctagccctgcagcctgtcccccacctctccaggccatgtgcacacagtccccaacatgcgccggctgatgccgcaacagtggtgctttttggatttgtctctagaggccaacacagagggcctttctgaatcctggggtcctgcccccttccgcggctcccatactgctcctccccagctgaatggccgctttgggaggtggttgctggccttgagaggatgccacagtgagtttcctgcgggcagggctgcatctgtggcgagcactgaatcgccactgctggatccagatgcctgtgcgtcccgggccccaaggctcccttctaccctcctcctggggtgctgttcgcaagccaggagacaggctgtgcattccctgcctactcagaggtgaccctgggccaggtgtgcgatggcccactggacccatagtagcagagggaggggagaggaagggagaaagtgggaacagcatgtgcagaggcctggggcctggcccatgtagggactagagggttgagtgtgtccatggggaggggccaagacggggagagccatgaggaatgatgggcacagagctcagaggctcgggagtctcctgaacaaagagaggaacacggcttagcttgttttttttttttttttttttggtttgtcagtatttcccaggtgtcttctgtgtgccagggactaacttggggataaagctgtgactttgagaagctgccggctccgcgggctttagcagctgctgctgtgatgaagcgatccacttgccctcagccccggcatctttggcccaagcccagccctagccctggctgggcacagccaggcttcacttggccacaggtcctgtagttgcctgcctggcgccaggtcagagagggacgcctcaggcaacatcgggttgccaggctgcttggtaaacaggcctccctgggcccacttgctgtcgcccaggtgtggctaacagatcgacagtatctcctgccccaggacgggtatgagtgtgggcaccatgccaaggttggatgtcccttcctgggacccacccacagctgggagcactttatcttgggcctctgtgggtgtagtgaggctgtgagtctggggcagtggcctgctgacaccctcctggcagggctcaggaggttcctccatgccctgccctcaggagggcggcacctggctcctggggtgggagagagtctggcaggactggctgggtgtggccggggagctgcccttcaggtctcatatctgtaggccctcatacctggactcgtcagttaggaacagttttctttttctttttctttttttttttttttgagacggagtctcactctgtcgtccaggctggagtgcagtggtgccatctcggctcactgcaacctccacctcccgggttcaagcgattctcctgcctcagcctcctgagtagctgggattacaggcacccgccatcatgccttgctaatttttgtatttttagtaaagacggggttttgccatgttggacaggtgtgtctcaaactcctgggttcaagtgatccgcccacctcccaaagtgctggaattacaggcgtgagccaccacgcctggcccatttttcattttctattgaaacaaaattcacacctgtaatcccagcactttggaggccaaggtgagaggatcacttgagccccaggagtttcagactagcctgggcaacatagtgagaccctcatttctacaaaaaaataaacaaaattagccaggggtggtggcatgtgcgtgaggttccagctacccgggaggctgaggtgggaggatgtcttgagcctgggaggtcaagagctgttgtttcataacatgaaattagcccttttacaatgttgcataacaatcacctctatctactcccaaaatatgtttgtcaccccaaaaggagaccccacatccattaagcagttgctccccattcctgccttctcccagctctcagccaccagcagtgtgccttctgtgactatttcatataaatagaatcatttgtgtctggcttctttcggcatgatgtttctgctattcattcatgttgcagcatggctcagtgcttcctttatttttatggctgaataatgtttcattttatagataagccatatttgtttatctgtttgtcagtttatggacatttgggttgtatttctatcttgtgtctgtcgtgaataagtactgctgtgaatgcttgcatacgagtgtctgttggttttttttgctttgttttgtttttatttttatttttttgagatgagtctggctctgtcgcccaggctggggtgcagtggcgtgatctcggctcaccgcaagctccgcctcccaggttcctgccattctcctgcctcagcctcccgagtagctgggactacaggcacccgtcaccacacccggctaattttttgtatttttagtagagacggggtttcaccgtgttagccaggatggtctcgatctcctgaccttgtgatccacccgcctcggccccccaaagtgctgggattacaggtgtgagccactgcacccggactttttttttttttttctgaagcggagtctcactctgttgcccaagctaaagtgcagtggcgctatctcagctcactgcaacctccacctccctgattcaagcaattctccctgtctcagcttcctgagtagctgggactacaggcacccaccatcatgtctggctaatttttgtgtttttagtagagacggcattttgccatgttgaccaggctggtcttgaactcctgacctcaggtgatctgcctgcctcggcctcccaaagtgctgggattacaggcatgagccactgcacttggccagctttttgtttgtttgtttgtttttgtttttgtttttttaaagaggtggagtcttgctatgttgcccaggctggagtgcagtggctgttcacaggcagtcatagctaactgcaaccttgagctcccgggctcaagcaatccttccacctcagcctcccgagtagctgggatctcaggcatgcaccaccatgcccggctaattttgtttatttttttgtagcgatagagatggggtcttactatgttgcccaggctgaccttgaactcctggcctcaagttatcctcccatcttggcctcccaaagtgctgggattacaggcatgagcctgtgcctggccctggctatctctttgttgttgagttaaaaaagttcttggcccagcccagtggctcatgcctgtaatcccagcactttgagatgccgaggcggacagatcacacgaggctaggacttcaaaaccagcctggccaacatgacaaaaccccgtctctaccaaaaatacagaaattactgggtgtgatgatgcatgtctgtaatcccagctactcaggaggctgaggcataagaatcgcttgaacgcagctactcaggaggcagaggttgcagtgagccaagatagtgctgctgcactccagcctgggcaacagatcaagaatctgtctcaagaaaatatataggccgggcacagtggctcacctctgtaatcccagcactttgggacgccgaggcagacagagcgcttgagctcaggagctcaagaccagcctgaccaacatggtgaaactccatctctacgaaaactacaaaaataagctggacgtggtggtgcacacctgtagtcccccagctactcgggaggctgaggcaggagaatccctagaatctgggaggcagaggtcacagcaagccaaaattgtgccactgcattccaggctgggtgatggagtgagactccatctcaaaaaataaatataataaaaatagatacaaaataattgttgtttctttttttttttttttttttttgagacggagtcttactctgttgcccaggctggagtacagtggtgtgatcttggctcactgcaagctccacctcccgggttcacaccattctcctgcctcagcctcctgagtagctgggactataggcacttgccactatgcccagctaattttgttttgttttgttttgttgtatttttagtagacacagggtttcactgtgttagccagcatggtcttgatctcctgacctcgtgatccacccatcttgccctcccaaagtgctgggattacaggcgtgagccactgtgcccagactttttttttttttttttgagacatgctcttattcttgtcacccaggctagagtgcagcgttgccatctctgctcactgcagtgtcaacttcctgggctcaggtgattctcccacctcagcctcccaagtaattgggactacaggcgcatgccactacaccgactaatatttttatatttttagtagagacgggatttcaccatgttgcccaggctggtctcaaactcctgggttctagtaatctgcctgactcccaaagtactgggattacaggtgtcagccaccatgcctgaccctaaaatagttttttatatattctggacactaaatacttaacaatagatgatttgcaaatagttctcctaagagttttcttgttttagctcttatatttaggtcattgctccatttgagttctgttttgtttgtatatggtgtgaggtaggggtttaacttcattcttttctctgtggttatccagttttctcaacagtgtttgttgaagacactattctttccccattgaatgttcttggcatccttatcaaaaatcaattgaggataagtataagggtttatttctggactctgattctgttccattgatctgtgtctcctttcttttgccagtaccactacactgttttcattactgtaccttcgtagtaaaatttgaaattgagacatgggaatcctccaacttcattctttttcaagactgttttggctattcagggtgattgagaacactttgccatatttgcactcatgttgttgttgttatgatgggctattcaaaagcaagctactgacatcatgggaatttgccataaatacttccgcatatgttttctaagaaaatatgcatttctctacaaaaccacaataccattgtcacatccaaataacttaaaattatggaatatgtagtccacactcacatttccctagttgtctttttttttttttttaataggatctcacgtctgttgcctagactagagtgcagtggcaccatcatacctcactacagcctcaacctcctgggctcaagcgatcctcccacctcagcctcccaagtagctaggaccacaggtgtgagccactctgtccagctccccagttgtcctttatttatttttttgagacaaggtcttgctctgtcacccaggctggaatgcagtggcacagtcatgactcactgtagcctcagcctcctgagtccctaagacaacaggcgcatgccaccatgcctgcctaatttttaaatttttttgtagagatggggtcttgctatgctgcccaggctgatctccagctcctgggttcaagtgatcctcctgccttggcctcccaaagtgctgggattagaggtgtgggcccagcctccccagttgtcctgtataacttttaaaaacatttttcgtttggctccagcccagggtcccactttgcattgcattgggcactcccctctttcttgtctcctgcactctggaatagctcccaccgttttggtctttcctgacattggcctgttcaaggagaccaggctggttgtcctgtagcctgccccacaacttgtccttttctgttgtcccttgaagatgagactagggcaaacatttttgccaagaatactacagatgatgcacctgtcccactgcagtatggcaggcaggggcacagtgcctgattgggctggcccgttcctggcatcgctaagtttcaccatttggctggagtggagtggctgcaggtttgtggaatgaatgactggtaacagctatcatgatgggtacagggagacagtgtcctaattcactagaccactgccccgccattagccccatctgatggtgagaaccccagttccagagaggctgagggacatgcctgtgtcacagtgaacaaatggcatggatggggtgtgaacccagcggtctgactccactggccacatgcagtcactgctctgcgcccatccaagaacagaagggctcagccgagcagggcagaggcagctccagctctgagttcctgtgggccagcaccatgccttgtggccctgtctgcccacctcagccttcaccatgcccgtctcagccctgatcatcctgaggacacaggctgtgttcctgctgtctgatcagtcgctcccttgtcttccatgtgggctgggcagtcagggcacccggcaatgctgccagggtggttttgtggcactctggaagaatctgggggcaccaaggggaggcagcaggagggcgacagggacccaggctcaaaagaaggcagctgacagggctgcaccgctcacgccagcctgtcttctctcgtagatgaagatgtgtgtgtctttaagtgctcagtgtcccgagagacagagtgcagccgtgtgggcaagcagtccttcatcatcaccctgggctgcaacagcgtcctcatccagttcgccacacccaacggtacgtggccctccttccattccggtgacaccagcccaaagcgcccagagccctggtgggcaggggcgtagagcctggctgaggggtggcccgtgcatccttaagaaggctccactgccctcaaaaccacattcccacatgcaggtatgcccagaatacactctggcctgggcagaccctggatcccagaccctccctcaccggctcctccgggtcttttggggcttggcttctatgtccccacctccaagaggcccatcctgaccacctgggaccagtctttctggcagtggccagccctgggccagctgtgactgggccagctgtggatggagtgaggcgaggtcctagaggcaggaagagtttgctcagggcgcagagaagccaccagaagggcttaaccaacccaccttgggggcacaggtggacacaagattcctgactaggggtgggagaaccccaggtggatgcagccagggtagcagagaggtgtccaggaatgcccagggctggagatggtctgaaggtcccaccgcaggcttggttaccagagacctgaagtgagtccagtggttgacacaggtgctggtgcgaggacagctggaggtggagaggctgcgtgcccatgagccactgccggcctcccccttgtctcaaggtagctgtgcagtgacccagatgtaccttgggcagcctgagccctcggggccagctgtgtgaagctgccatgcctggctaattttttgtagagatgggttttcactgtgttgcccaggctggtcttgaactcctggcctcaagtgagccacctgcctcagcctcccaaagtgctgggattacagatgtgagccaccgtgcccggccccttttttttttttttttttttttttgagaaagagtgtcactctgttgcccaggctggagttcagtggtgctatcttagctcactgcaacctccacctcccgggttcaaggcgattcttatgcctcagcctcccgcgtagctgggactacacgtgtgtgccaccgtgcctggctaatttttgtgtttttaatatagtagacatggagtttttcatattgcccaggctggtctcaaactcctggcctcaagtgatccacccgcctcagcctcccaacgtgctgggattacaggcatgagccactgcacccggccgttcccactcttaagactatttgtattttaatattttttatttcagttctgtcagtttttaaaagttgtgctaaaatctacataacaaaatgtgatcattttaacccttttgaagtgtgtaggttggtagcaagcagcacattaacattgttgtgcaactgtcactaccgcccatctccagaacttgctcatcccgaactgtgtcttttcattgtttttgagacggagtctcgctctgtcacccaggctggagtgctggagtgcagtggcgcgatctcggctcaccgcaacctccatctcccaggttcaagcgattctcctgcctcagcgccctgagtagccgggattacaggcacgtgccactgtacccagataattttttgtatttttagtagagacgggggtttcaccatgttggccaggctggtcttgaactcctgacctcaggtaatccgcctgcctccgcctcccaaagtgctaggattacatgcgtgagcaaccatgcctgaccgtgtcttttaatttttaaagagattgtcttttaaatattgttttgttttttacttgatataatttagtggctattattctatgttaataaatatagctttattttattttattttattttattttattttattttattttattttattttattttattttgagacagagtctcactctgttgcccaggctggagtgcagtcacacaatcttggctcactgcaacctccacctcccgggttcaagtgattctcccacctcagcctcctgagtagctgggattacaggtgcccgccaccacccctggctaatttctgtatttttaatagagacagggtttcaccatgttggccaggctggtctcgaactcctgacctcaagtgatccactcgcctcagcctcccaaagtgctaggattacaggcataagccaccgtgcccggcttattatttcttgtagagacagggtcttgctatgttgcccaggctggcctcttaaactgggctcaagcagtccacccgcctcagcctcccaatgtgctgggattacagttgagaaccactgtccccagccaaatagatagagcctgctttaaagggccacataccattgcatctctgggaagggtggtgattggtgattctctgccatgcttttcttaattttttatttcatgtttttgtttttgttttttaacgaggcagggtcttgttatgttgctcaggctggtctggaactcctgacagctgatctgcccacctcagcctcccacctcagcctcccaaagtgctgggattacaggcatgagccactgcacctggcctctactgtgcttttctgtgcccctggcatttgtccagtcccctcttactggacattgcagtgtctgctgcccccacacagatgctgccctgagcttctgggtggacttgggcttatttgccagagctttgactcctgggccggtgggcgtgtgcttgagagagcttcaccaagctgccctttggtgaggaatccccaggcccactcccaccagacagcagccccacatgcaggctacctgccctcttctcatgtcagtcaccacagtgcaggcatggctgcccttcatcttttctttgaactttgaaaattgtttttcggggaagagaaatcaccagccctgtatgttcaagggagaaacgtcaggacatacggccatccagaaccttccctcccagatggccacatgctgggttgctgaccgccccccggtgacttggcttccctgttccagatttctgttccttctacaacatcctgaaaacctgccggggccacaccctggagcggtctgtgttcagcgagcggacggaggagtcttctgccgtgcagtacttccaggtgggttgtactccccctcagccaggccgcctccccccggcagcccccctgccactcacccgcaggaggccacacagcacagggaaggcccacccaagttcccgtcctggctctgtcccttactggccatgtagccttgggcaggtttcctctgctggctgggcctcagtttcctcatctgtgaagcggagatgcaggtgcctgcctgagagggttgctggaaggatctgagcacaggtggagctcagggccacaggcgttgtgaataacggtagagcagttacaatgccctgagcgctccctgcatgccaggccctggtctaagcgctgtcacatgcacagaagcacttggaccctcccaacaacgctaggaggtaagtgctattattgtccccattttacagatgagaaaactgaggctcagagaggttaagtgacttgctccaagtcacacagctatatgcaacagagccaagatgggaagccaggtctgcctgatgccaaagtctgtgcccctgcccaggtgccacgctgcctcccgatcgcccgttgtcttacagagagacaccacacctcacctgcctggcgctctgagttctagggctctgttcgatctgcttctcttcttctttggggccctcaagatgaggcaggtggcccccgatgccagaaccctgcctgtggcaaatcttgagttctcctgggcggcttccaggtccaggcggcatcagctgttgccatcggctgcagtgatagtggcggtgtcctcctgggggctgccctccggcttcctgctccctctcctggagctgctagtggggcccaggcagagggtgcacgacctcccgagggaggtttgtgccctagatggccccttgctctatcacagggctggccagggccttggctgcctcgtgccaccatgtgccccgtgccatcggtatgtctctgttccagttttatggctacctgtcccagcagcagaacatgatgcaggactacgtgcggacaggcacctaccagcgcgccatcctgcaaaaccacaccgacttcaaggacaaggtgagtggcccgcgcatgtgcccacctctctgcttctgtctcggttttttttttctttgctcattgattttatctttaattttctcagattagaaatgcatttatctcagttactgcagaggctgaggcaggaggatcgcttcagtccatgagtttgaggctgcagtaagctatgattctgccactgcactccagcctgggcgacagagcgagactcttgtctcttaaaaaaaaacaaataaacaaggccaggcgcggtggctcacgcctgtaatcccagcactttgggacgcccaggcgggcgggtcacaaggtcaggagatcgagaccatcctggctaacacgatgaaaccccgtctctactaaaaaatacaaaaaaattagttgggcgtggtggtgggcgcctgtagtcccagctactcaggaggctgaggcaggtgaatggcatgaacgcaggaggcagagcttgcagtgagctgagatcgcgccactgcactgcagcctgggcaacagagtgagactccatctcaaaaaacaaacaaacaaacaaaaaaaacaaaaagcaagaaaaacaaatgcatttgatatataaactcaacacagcatgtacattataggcttgagaggcctctatcagttccctccaagatagccgctacccctcagtatgaggtctcttcttcaagatttttccccatacagacatcagcgtatattttacaattattttattgagctgggcagagtagctcacacctgtctgtaatcccagcactttgggaggccaaggcagggggatcatttgagcccaggaagttgaaactgcggtgagctgtgattggggtactgctctccaggctgagccaaagtgcgagaccctgcctcaaaaacaaaataaataagctttttgatatcaccaaataatgtgcactcatgattaaagagagagagaacagagcagaacgtctgtattcaaaagtagaaatcggccaggcacagtggctcacacctgtaatcccagcactttgggaggctgaggcaggtggatcacttgaggttagcagttcgagaccaccctggccaacatggcaaaagcccatttctactaaaataaaatacaaaaattagctgggcgtggtggcaggcacctgtagtcccagctactcaggaggctgaggcaggagaatcacttgaacctgggaggcggaggttgcagtgagccgagattgtgccactgcactccagcctgggcaagagagcaagactccgtcttaaaaaaaaaaagtagaaatgtataatgtattcccttctcatcccatttgccagagtttttggtgtctaccttttttatttttttatttttacttttttttttatgagatggagtcttgctttgttaccaggctggagtgcagtgacacaatctcggctcactgcaacctccgcctcccgggttcaagcaattctcctgcctcagcctcctgagtagctgggactacaggcgcacaccaccaagcccagcagatttttgtatttttggtagagacagggtttcaccatgttggccaggatggtctagatctcttgacctcatgatccacccacctcagcctcccaaagtgcttggattacaggcatgagccactgcacccggcttactcagaatttttgttttctctttctgtttttggggggttttttgagacagattctcactctgtcacccaggctggaatgcagtggcacaatctcagctcactgcagcctctgcctcctgggttcaagcgatttttgtgcctcagccggccaagtagctgggattacagtcatgtgccaccatgcccggctaatttttgtatttttagtagagatggggttctgccatgttgcccaggctggtctcaaacttctggcctcaagcagttcatccgcctcagcctcccaaagtgctgagattacaggtgtgagccgccgcacctggcctgttttctcttttgaatcaaatgggagcctgtttttttcctccaagtattttggggatctctccacgtggatctgcatggatctgcctcatccagcgcctgggtcacgcccccctagcatcgcttaccgtcccagaggatggtaggccttgggccctggggaggagttgtcttgacacaagagtgtctgccctggcagggccatcccgagcctcctcctggccactgaggtctgggaaggacgtcctccgttggtgaagtcccttcctgctccccaaggatggagatccatttcctggttcatctggagctctgatcagtaccctgaggccttcccacctgaccccagcttcccctgcaggcactcaccatgcccagagcatttgtccttcaaaagctcatgcctgtcaccaccaggaatgtctgtccttggtctgctcgtgtggaagcaatcccacaaatccagaacaggtggtgtgttctcccagaccctggcctggactctgccatgagtgaccaccacgggccagtagccctgcggggagcccagccggccccagggcttgggcggctcacctgccccagccaagacgggctgcttctccaggcatgagtcagcatggagctgggagacactgccaccaacaactcgggcccctttcctccatgctagaactgcggaggccccggaaaaatgcttttcaactgccagtgagcttccaggggaggcccgtgccactcaccccagacgatccggaggcctgcaggccacagggttggggccgagcgggagcttccccagggcttctcctcccggaggactggcccatggctcatcttgagttctcgcttcattttgaccaagagcccataaagggcaaacattgagagtgaagacagacgcctcatgatgtgcacatcccttatgatcactgtcacctccccatcaccgtcgcctcctatgtctcgctctcacctcccactcctccctcagatcgttcttgatgttggctgtggctctgggatcctgtcgttttttgccgcccaagctggagcacggaaaatctacgcggtggaggccagcaccatggcccagcacgctgaggtcagtggcccgctggtgcccacccagcctcgtcctcgcccatgagtgccatgccggccccagcctagagaagcttgggaacccccaggggcctggggacattacttctgtgctttggtctctttattgtccccaagacagtcatttcagggaggggcttcagggcctgagatgattttctctcatggccggtagtcagggccacatgtcatttccctgttttcttttttttttttttgcactgaaaccttcattcacaaagttcaaaacataaaagctaaaaaagagcagacagcgtgctctccttccccaccccagctcccacccccagccccatcatgagagaggagctacggccacaaagtctgagcagagctattccgtgagcgtcctctcgcaccagtggaggctgcaccctccattccctgctctgcctctcccatggatctggggtcgccggggtcgtggaggggccatctttgttctgtcttgccgccgcagagcacccctgtgcccagccgtgccgctgttgctttagctgcattgtgtccgcagcgacactcagactccttccaggtcttcacgtggccaacgctgctgtcctgagcccctctcccacatgcggttgtgtctgtaggacacaccctagccctggaatcgctgggttgggggtgcatccagctttagctttggtggctgttgtgatgtctgctcgtccccctctttgcagccaccagcagttgtcgacgcagggtgggggacctaggaggccgcagcaggggacggccctgaggcagggccggggtcacagtgaactctctttttttttggggggggtctcactctgttgctcaggcttgagtgcagtggtgcgatcctggctcattgcaacctccacctcccgggttcaagtgattctcctgtctcaggctcctgaatagctgggatccaccactgcaactggctaatttttgtatttttaggccaggcatggtggctcacacctgtaatcccagcactttgggaggcttaggtgggcggatcacctgaggtcaagagttcgagaccagcctgaccaacgtggcaaaaccccattagccaggcgtggtggtgggtgcctgtagtcccagctactcgggaggctgaggtgggagaatcgctagaacccgggaggcagaggttgcagtgagccgagatggcgccactaccacctccagcctgggcaacagagtgagaatctgtctcaaagaaaaaaaaaatagttttttttttttggtatttttagtagagacagggtttctccatgttggtcaggctagtctcccaacttatgaggtcaagcagtccgcctgcctcggcctcccaaagtgctgggattacaggcatgaggcaccgtgcccggcccacagtgagctcttaacaggctatggccaatcgcagccatggttggggcgccagcgaagcaggcagaggggcacccaatgcccatgtgtggatggaggctgtcccttgagagcaggtctagggagggccccatggcaggaagacgcagggaagcccacatggccctgcccgcctgcaggtcttggtgaagagtaacaacctgacggaccgcatcgtggtcatcccgggcaaggtggaggaggtgtcactccccgagcaggtggacatcatcatctcggagcccatgggctacatgctcttcaacgagcgcatgctggagagctacctccacgccaagaagtacctgaagcccagcggtgagcactggggggtacacaggccaggcccctcggtggaggccctggctgccgctgagccaggccatcagtgcttcagctccctgcttactgtcggtggcccggggtgtagggaagcctgggcttttcccccgctcccaccccaaccccactccagccagctgtggcttttggagccctgggccccaaacacggccagacacccagctgcccactcgcccagacagggtacacaggatctcctggcacctctgccgtcccatgtcctgctcctgcgggacagcctctggctgggagtggggattgggacaggttctgtggtcagcagttccccaacaagccctgctctcctcacagtccaggaggtggggtgggcgagcatgtgtgcaaatgcaggggtgtgggtgcgagtgtacgtgtgtgaggaggtgaggtagctgtctggcaagcccatctgtcacttcccatccgtgcctctgggtatggcctctggtcactgggtgactgtttctttttttgagacagagtttcactcttgttgccaaggctggagtgcagtggtgcgatctcggctcactgcaacctgcacctccccagttcaagcaatttttgtgcttcagcctcctgagtagctgggattacaggtgtgcaccaccacgcccagctaagttttgtatttttagtagagatggggtttcaccgtgttggtcaggctggtcacgaactcctgacctcaggtgatctacccgcctcagcctcccaaagtgttgggattataggcatgagccactgtgcctggcctgggtgactgtttctatttgcccatctgtcttggggtctgtgcagccctgacgcctgaggcatgtgcctgtggctcttctcatgctaggtatgtgagcgtctgagcatttctgtacaggcaagcagctgtgtgtgcgtgtggcagggtacaggtccccagccagggtagcagccatgggatggagcgtgggcagcagcaggctggtggggcttgtgcaggcaggggcaggggggaagcttccactctcatctctggcccgccctggatccaggccctagggtcctggctggctgtgctcctggaggtgggaggtggcgtcccacagctgtgtctcatgtcttgggtgtgagtatgggaagcaaggctgctccaggggctgtgggccccactctcctccccttctgccctgatggtggggatgggggtggggacagccccagcagagagggcccctcccgatgggacatgaagccagatggcagtcaggctctgtgggcagctgcatgtgcccccgacgtcccagcagccagcttgcagggaggggggaggccaggcctgtgcaaggaggactcctgtccagctcaggaagctcttccaggggttaaaggcagccctcccctctcccagtcacatgtcttctggtcagcaggagccagaggttccttccaggctgggtcacttcccatggtgcccccaggtcccccagggcagaagccgcagcatgtgcatctccctccccgttccagcagctgcagccctgcagctctcgcctcgggtacagcctggtggcgtaaggaggaggcagagtcccactgatacctcaggatctcctcccccagcttgcaaggctggggggcccacatctggaggccaggtgctccttggggcaggcggggctgcggggccctgatcctccctgccactggccctgactcatgcgtctacccttgagtcacagagggaggccctgcccttccctcagtctgtgtgcccagaccaggcaggccaagtggcccatcctgccggctgggtgcctgtgccagaacctaggcagtccctgtggtgtggatttggcttcccccacctggctcttggcctcaactgaggtccccagcggcgttggggtagcccggggcccaccaccctccctctgtccagagcaactttgctatgctttcccggctgcacacatgcacagacggcagggcctgagaggcagcgcctggccacatcccgggcactgcctgcttccccgtgagtctttggcaggtccctcacacctgccaggtctagtaataggacataaagatgagccaccagcctcccagtctcaggtggaattcgtgagctggtgcaggtcaggtacccgtggtggtgatgaaacactgatcagaataggcgctcggtgccactgtcacaggagtgcaggaacgaatggatgacaggctgggagcacccagggttgggggtcttggggtcctttggaagctctgccaggcagtgtgggatgtgtcacctgacgccagcacccctccctgccccactcccaggaaacatgtttcctaccattggtgacgtccaccttgcacccttcacggatgaacagctctacatggagcagttcaccaaggccaacttctggtgagtgtgccctgggtgtcccgcctgggccccacagcctgccttctcagggacagccccagctccccagagagcctgcactcctctttttctgaaagacttgggctagatgagggctgactgggagagaaggcagggctaccccacctgcctcttctgcagccctgaccttgctgtgggggtggggcctgtccacaggtaccagccatctttccatggagtggacctgtcggccctccgaggtgccgcggtggatgagtatttccggcagcctgtggtggtgagtagggcctccagggtactgctgcagtgatcacttgccattgctgtgcagctgtgcagccctcaggaagctacagcccctctctgagccctctcctctgccctgcacagcgctctcacagagatttgggccaaaagtgtcaatgcatgtagacacttagcacacagcacacatgcaatacatgtggaacattattaggtgaggctaaggcagagggggcatttaggctcaggagttcaagatcagcctgggcaacacagagacgccatcgctatttttaaaattaaaataaataaataataaaaataaaaaagaaccattactagatgaatttatccttggtgagctgatgtgatttattgattgattttacttgagatttttgatacatagatccatgatttaaaaatcaaaaggaaaaaaaagctaggtgcagtgggtcacacctgtaatcccagcactttgggaggccaaggcgggcagatcacgaggttaggagattgagaccaacacggtgaaaccccatctctactaaaaatacaaaaaattagccagacgtggtggcgggcgcctgtagtcccagctactcaggaggctgaggcaggagaatggcgtgaacccgggaggcagagcttgcagtgagccgagatcgcaccactgcactccagcctgggcgacagagtgagactccgtctcaaaaaaaaagaaaaaaaggttccattttattctgttttccccctgctcttgatgtttttcattcgttttgggagactcttggactatcttggatactatctctttaaacactacgtctgccccattctttctccttctgggattccaattacgtgtacagtgaaccttttcaccatatctcagatgattgttatactcttttctgtcttttccatccatttttttctctcattttctttttctttttttttttttttttgagacggagtcttgctctgttgcccaggctggagtgctgtggcatgatgtcagctcactgcaacctccactttccgggctcaagcgattctcagactcctgagtagctgggagtacaggcgcttgccaccactcccagctagttttttgtaattttagtagagatggggtttcgccatgttggccaggctggtctgaaactcctgaccttaggtgatccgcctgcctcggcctcccaaagtgctgggattacaggcgtgagccaccatgcccagcgtgttcagtcttttgtgatatcactggggagtgaatgagtgaaaaaagcaggaaatattttggtggtattatgcaaattttgtattatgatgagggtgccttggaagaggccacagtttgagaaggtgctgctttatggtacagcctttggtaatgttaatgcaagtccagtggttagcctcattaccaatatgctgctgaaccacccgttagcttttattgttttttgaaacaggatctcactctgttccccaggctggagtacagtggctcaatcacttcatggcttacttcagcctcgatctcccagacgcaagtgatcctcctgcctcagcttcccaagtagctggaactataggagtgtgccaccatgcccggctaatttatttttttgtagatatggggcctcactgtgttactcaggctggtcttgaactcctgacctcaggtgatccgtccgcctcggcctcccaaagtgctgggattataggcataagccactgcacctggcgttgagcctcttattagcggctttctgcttggtgtcttagcctctgatgccctgcctcgctcaaagctcaggagttggccaatttcacaagcgcactgagtgtgcaccgcccaccttgccctcctgcacttatttccctttgctttgacatcacagccccttgaatccgagctgccttggtaaccctgagctcccattttgctttccccacccaaggaagctgctgaaaggtcgaggtggccgttttctgccctccccatggggaaaaggtagaggccagaaagggctccctccagaaagggcatttccctcctttccaggagcttgatccccaaaatcctggccgctctggttggtcaccagtgcttccaacaactggtttattcttttctttggattttattcggtttacatagttcatggcaggtgtgttagtcggatataaacattgctgggagtggacagcagcactagtgttgttgttgtttttaagagacagggtctccctgtgtttcccaggcttgattcacactctcgggcttaagcgatcctcctgcctcagcctcctgagtagctggagttacaggcatacaattccacacccagctagcacctagttctttaacttgcttttttggttaacttgcttaatgatttagcttggagatctttcctcatctgttcataaagagcctcttcattctttctcacgtccgcatggtctttgatgggagagccatcactggtttaattagatggtttccagtgtgtcgctaccacggacaatctaattatacatgtaagtttgttgatgtgttcatgtatctggaggttaaactcctgtagtgccaaatcttttatgtggataaacacttgtcatttggagagctgtcacctgattgccctcggtggcgttgtgccggtcccctcctcacggcgtgtctgggaagagcaagctcgttttagctgcacagcctagaagccgtgggcagacctgggggaaggggcagggctctcccctcccatgctggccctggcgtcagatgccacgtcacacctgtggtctctcccaggacacatttgacatccggatcctgatggccaagtctgtcaagtacacggtgaacttcttagaagccaaagaaggagatttgcacaggtactggcacccacactccatcctcccaggcctggctcaggccgaaggtcagggccacccctggctcccgccggcatcctgccgtcccagggcagatggtgggcgggggccccaggcctctgcacctggcaccccctcttctctctcggcagcgcctgtctggcttccccagcagccactgccctttgccttccaggatagaaatcccattcaaattccacatgctgcattcagggctggtccacggcctggctttctggtttgacgttgctttcatcggctccatgtgagtgccgcagagcagcccatgctgcctcctccccactcccagggcttcctgcagctgcaacctggctgggggggtggaacatggctccaggttccaccatcccttccaatgggagtgagagcctgtctcggagcaagagactgttgtgggtggggtgtgtgtgtgtgtgtgtgtatgtgtgtgtgtgtcctgtgttcccagtgtctgtccctcatgggtctgtgtctgtctcttggcacatgtcagggtgagtagggatctcgtggttgcgggcccctcgtgtgtacatgtatgcctgctcatgtttgtgtctgggactgcctgggggccagcctgtctctgctccagggtcccaggggtccctggcagagggggcaggtgcttggggaggactcaaggcatacaaggtggtggctccagtggtggcgccggcccagtcaagtatgtgcctgtccctgctccacagaatgaccgtgtggctgtccacagccccgacagagcccctgacccactggtaccaggtgcggtgcctgttccagtcaccactgttcgccaaggcaggggacacgctctcagggacatgtctgcttattgccaacaaaaggtgcgactgctccctggggctggtggtggtgggcaggggtccatctgcccagcagctcatgccacggcctgcaccctgtccgcagacagagctacgacatcagtattgtggcccaggtggaccagaccggctccaagtccagtaacctcctggatctgaaaaaccccttctttaggtaggaggggccccttgcctgcacaggggggcgccccggccctgcaacccccttgcccctgcccatggctctgtctctgccatagatacacgggcacaacgccctcacccccacccggctcccactacacatctccctcggaaaacatgtggaacacgggcagcacctacaacctcagcagcgggatggccgtggcaggtgagcagggcccaccccaatgcccagccaacccgggaggccgccctcgccgcaggcctggcccctctgcctccagccctgacgtctccctctctggacacagggatgccgaccgcctatgacttgagcagtgttattgccagtggctccagcgtgggccacaacaacctgattcctttaggtgagtgtcccccagggccaggggcagcagggagccatgcccaggactgcccaggggccgggaagggcctgtggtgaccagggtcggcctctgcttggtcctttcaccttttcctcttcctgggggctctcggccgaggctctccgtcctctctgcctcgctctgcagcctgctgctgtgcatgggctgggtggctgggggcggtgacgccgtctcccttccttctttcctccctctcgctgcgcagccaacacggggattgtcaatcacacccactcccggatgggctccataatgagcacggggattgtccaaggtaacgagggtggcgggggcagggcccgtgggggccgagctagcgtgtgagtcgccatcctctgtccggccgcccgcctgccctcttgcctgccctttctctctctctgtgactctgcctgggggctgggcgggccagggcagcccctcactgccattgcctgctccacagggtcctccggcgcccagggcagtggtggtggcagcacgagtgcccactatgcagtcaacagccagttcaccatgggcggccccgccatctccatggcgtcgcccatgtccatcccgaccaacaccatgcactacgggagctaggggcccgccccgcggactgacagcaccaggaaaccaaatgatgtccctgcccgccgcccccgccgggcggctttcccccttgtactggagaagctcgaacacccggtcacagctctctttgctatgggaactgggacacttttttacacgatgttgccgccgtccccaccctaacccccacctcccggccctgagcgtgtgtcgctgccatattttacacaaaatcatgttgtgggagccctcgtcccccctcctgcccgctctaccctgacctgggcttgtcatctgctggaacaggcgccatggggcctgccagccctgcctgccaggtcccttagcacctgtccccctgcctgtctccagtgggaaggtagcctggccaggcggggcctccccttcgacgaccaggcctcggtcacaacggacgtgacatgctgctttttttaattttatttttttatgaaaagaaccagtgtcaatccgcagaccctctgtgaagccaggccggccgggccgagccagcagcccctctccctagactcagaggcgccgcggggaggggtggccccgccgaggcttcaggggccccctccccaccaaagggttcacctcacacttgaatgtacaacccaccccactgtcgggaaggcctccgtcctcggcccctgcctcttgctgctgtcctgtccccgagcccctgcaggtccccccccgcccccccactcaagagttagagcaggtggctgcaggccttgggcccggagggaaggccactgccggccacttggggcagacacagacacctcaaggatctgtcacggaaggcgtcctttttccttgtagctaacgttaggcctgagtagctcccctccatccttgtagacgctccagtccctactactgtgacggcatttccatccctcccctgcccgggaagggaccttgcagggacctctccctccaaaaaaagaaaaaaagaaaaagaaagaaaaaataaatgaggaaacgtgttgcagcacaggcagttttcttctccttctgctcccctgtttctcatacccccaaactcagatgctggagctcaggcccgccgtgtgtgcacccaggcaggagcgggcgctgtccaggctgggccgcccccttggctctccctcctgttccaggggagccataggagggaaagcaggtggcccgggggggatatgggggccccagccctgtcccaaagctccctgctcggctgcccctcgcccgcctttatataaattctctgaatcacctttgcatagaaaataaaagtgtttgctttgtaagaaaagtctggaaagtagcagaatcatctcaaggtgtcaaaggagccttcagtcatcgtctggggggcaggacaggcagaggggttggtccacttaggtgttgcctgaaagaaagaattgtctgggagtggccccagaacctctcgccttgactgggagtgggagggcagcccccttagcccagctgggaatagtccttacctgtgggacccgggccttcctaggagggggccagggactgcggcaaggtaggggacagcgcgatgtttgagggcagagatgtgatttggggtggaggagccacgttctccggaggcagcgactggaagaagtacaactgcacaagacccctggggtcagaggcagggccagcccatgcccccctagcccctcggccccacctgtggccaccccagacccgtaccttacagcccatggccaggagggcgtggagcagcacgaccacggacagcagcactgtggccaccagcctggtgtcctcacggaccacgggccagagggtgaataccagcccggcggctgacaggcccagggccagcgccccaaagagccactgcagccaaggcacagggatgagccacaggacctgggagcaacacggcggcaggtgaccatgccagtccccccagccaccacccactctgcaccaggccaccctcaccaccatgggaatgaggcggcaggtgaccatgccagtgtccccacacagccaccacccactccgcgccaggccacactcaccaccatggggatgaagacaaagagggagtagccgtagatgcacacagtctccaggaaggtgtagggccccatgcgctcctggacacccttgcgccaccgcaggaagccccacagggccaggggcaccagccacgcatagcagtagatgctgatgcctgccacggtcactggggggggcaaggtgagcagtcaccccctgtaccccagggccctgccaggcattgggcctgcccgtctgcttacccttgtggaactgggggctgtagtggatggaggggtccctcctctgggccagcaccagcgtcaggttgccagtgacggccaggacaaaggccaacgtggcacagatccagaaggggcctgggggtagggggcacagtcagggtcccgggccctgcactcccaggacaagcagacatgtatcctgactgagctgtgctgagaccccagcctcttcctaagcaccttgcctgactcaccaggacaccgggggcctcctggtggctgagcccagtgctggctgtcagttcatccccctccccgaaacactcaggactgcacacccttggcctgtgtctcacctcattggtgccaattcctcaacccctgtcacctcctctttgactctctgaccccttcagccatggggagcagccaggcccagttcttggccccttccatgtctgcgttcacccatagtatgacctccttcaagcccagggccttatgcctcctctagagcccagggctctgccctgagcactgcaggctccagttcaagctcccgggtgggcatctccggcttcatccacacccttgccctctgccctcactgccaagctggtcccgtggatacgtggcaactctatccatcccgttagtccaggcagaaatccctagagcctgcctccgctcctaacctcccactccccccacccccacctatctagccacaaagccagtctcttctacttccccagcacgttccagaatccagtgccactctccacatccacagtccccaccatgtggccgcctccaccccagcctcctggcttccgccctcgccactcatgatggcgagagggaccccgaaaacacttaaagatccattctcggccagataacagtgactcacacctgtaattccagcacttaggaggccgaggcgggtggatcacctgaggtcaggagtttgagaccagcctggctaacacggtgaaactccgtccctaataaaaatataaaaatcagccgggcatggtggcacgtgcctgtaatcccagccactcaggaggctgaagcaggagaatcgcttgaatgcgggaggggaagattgcagtgagctgagatcacatcactgcactccagcctgggtgacagagtgagactctgtctcaaaaaaaaaaaaaaaagatctcttcttgccacagcatgggaggcttgtgtgatctgtcccctcgcctgtgacctccctgcagctcactcgctccagtggtaatgccgccctgcagttcatgcaagttcctgccatgaagcttacgtcgtttctggaagcctcttttcctaggtctcccccacccctcctgttgccaacaaggctcattccctcaccctcctcagggaggcctgccctgctgcaccctgcagaactgcagggccactcctcctgtctgctctgctgctctctacccgccaccctctgcagtccttcatgtctctgtctccctgaacagcaggtaagtcacactgtctgagtgactgatttgtccgcagctatacactggcatctgcaactcaggccacacttgttgagtgatccatcaaggaaccaaatgcacaacctcactcaccatacagatccggccgattccgcagatggtgccgcacaaagttgtggccaggccggggcagcagtgagcctttgatccggtccaggacctgggggcaaggccaaggtcaaggatggaagtctgccaggagcttctcccttgtcctgagaggctccttccctgctgacctccacccttctctttccatgccccacctgaaagaactcagcctttccctctctttttttttttttttttttttgagacagagtcttgctctgtcggccaggctggatggagtagtggcatgatctcggctcactgcaacctctgcctcccgagctcaagcaattctcctacctcagccacccgagtagctgggattacaggcgtgtgccaccacgcctggctaatagttgtatttttaatagagacgggatttcaccatgttggccaggctggtctcgaactcctgacctcaggtaatccacccacctcggcctcccaaagtactgggattacaggcgtgagccaccgttcccagccccctcttttttttccctctttttttttttgttttgagacggagtctcgctctgtcacccaggctggagtgcagtggtgccatctcggctcactgcaagctccgcctcctgggttcacaccattctcctgcctcagcctcccaaagagcagggactacaggcgcccaccaccacccccggctaattttttgtatttttagtagagatggggtttcaccgtgttagccaggatggtctcgatctcctgacctcatgatcctcccaccttggcctcccaaagtgctgggattacaggcgtgagccaccgcacccggcctcagcaccccctttttctttttgagacagagtctcactctgttcaggctggagtgcagtggcacgatcttggctcactaccacctccgcctcccaggttcaagtgattctcgagcctcagactcctgagtagctgggactacaggtgtgtgccaccatgcctggctaatttttgtatttttagtagagatggggtttcaccgcgttggccaggctggtctccaactcctgacctcaagtgatccaccgcctcggcatcccaaagtgctaggattacaggcgccgaccactgcacttggctaatttttctattttattttattttttatttaattttattttatttatcttattttatttttgagacagagtctcattctttttgcccaggctggagtgcactggcacgatcttggctcactgcaacctccgcctggcggattcaagcgattctcctgcctcagcctccagagtagctgggattacaggcgcccaccacaaagcccggctaattttgttgtatttttagtagagacggggtttcaccatgtttggccaggctggtctcaaactcctgacctcaggtgatccacccacccaggcctctcaaagtgctgggattacaggcatgagccaccccgcacccggcagtttttgtatttttggtagagacggggtttccccatgttagccaggctggtcttgaactcctcaggttatctgcccacctcggcccccttaagtgctgggattacaggcaggagccactgcgcccagtccatctttggtcttctgcatatgctgttccctgtgcctggaacatatactcctgcttccctaccctattccccagggaagccttctgtctcctttaggtctcagccaattcctcacctcccccaggaggcctttctctaacccaccagattgtgtgtgtcccctgtgttcccatagtcccgatccataaccagtcccaccataaccctttgagagcaccacagttcgttcaccagcacccaccatcaccagcaccctgcccaggggaagagtggctgaaccctgagcataactctgagccccatcccacctgcctccccagcctgacctgtgaggtgtccacgtcaaagaagctctgatagtagctgaaggtccagaatcccggctgctgctgctgctgctgctcctgcaggagctgcacattgcgggcattcagtgcctgcccggagagcctgggtcagctgggggctgcaaggaggcaggacacagggactcaccgcggccttgtcactctcctcctccacctcatcctcggctccatagctgccacctgagcccacggccacagccacgtgcccttgtggggtcagctgatcgcttctgctggtggtggctgcatctggggtgtcagccagaagattagtggcctcctcgaattctgtggaggaggtatatgggacacacgcacgtttgaggggtggaaagaactcgactgggcccaagctaaaccgatgctcatctgggggcggaggctctgctgagccattgatctcccccaaggtggggcccaacttcctcagtttggaggcatccggaggacatctgttcccttcctcctaaagtggaactgcaacttagggttgacgctgggatggggtcagggtctggggacgagaggctcgggtttgaggtctgagttcagggcgggggcggggttcgagtcagagatgggtctcactcctgggtcagggttcacagccgcctaggcttcggggtagagaaattggaagccgtatcggggggaggttctggcccggggcgggagtgggagatccggccacgtcggggccgcactcaccatggaaggtcagctcgtcggccgatgccatggtcgttcaggggcgtctccgcatccctcgctgaggacagagaccggtcaggcacacttcccccccgcccccgagccggtccctcggcccccagccctacctggcgaccaactgcacccacggaggcttgaactcgtcgtcccgtccccacaggtgcgctccgccccccctcacctgaggccacctgggccggcgtggctggggctctctgcgcctgcgcgtctcgcctacccgtcagactccaaccgactcagacctgacagcaacatccggcgcctgtcctctttctatcctctcccgttgggaagccacttccggtaaagttggcgcttgcgcagaagagactcccgggctcttaacgtcgggtatcaggagtttcttcccggagcaaggacccccaagacggaagaggatggccgcggcggctctgaggagattttggtcccggcgccgcgcagaggcgggcgacgcggtagtggcgaagccgggagtgtgggcgcggctgggtgagtagcggcggaaggcggcagggtgggtggccgccgcgacagggtgggtggccgccgcggccggatcactcttaccgcgctcctctcccctcagggtcctgggcccgcgcgctgctccgggactacgccgaggcctgcagggacgcttcggcggaggctagggcccggccggggcgcgccgctgtgtatgtgggtctgctgggcggcgcggcggcctgcttcacgctggcgcccagcgagggtgccttcgaggaggcgctgctggaggcgtcggggaccctcctgctgctggcgccggccacccgcaaccgcgagtccgaagccttcgtgcagaggctgctctggctgcggggccgtggccgcctgcgctacgtcaacctggggctctgctcgctggtgtacgaggcgcccttcgacgcccaggccagcctctaccaggcgcgttgccgctacctgcagccccgctggaccgacttccccggccgggtcctggacgtgggcttcgtgggtcgctggtgggtgctgggggcctggatgcgcgactgcgacatcaacgacgacgaattcctgcacctgccggcgcatttgcgggtggtcgggccccagcagctgcattccgagaccaacgagcggctcttcgatgagaagtacaagcctgtcgtgctcaccgacgatcaggtggaccaggcgctgtgggaggagcaggtcttgcagaaggagaagaaggacaggctcgccctgagccaggcccactcgctggtgcaggcggaggccccgagatgaaaccctgaggcccccgagtcctggcaaactgcttgcctggggtggtgcagttctgagtgtgcctcacctgcagaacagctgagacagatgatgtgcaaagtgttttctcactggatttgcacaagtttggggagcctttctgccccccgtctttgttctttattagctgaagctaattcagagccacctgggtccgggagttggggacagcagaacgacttgacacatgttcatcactggcagagctggtcatgagccttttatataagcctttttcatcgggcctcagaggccctccttaaggaggtaccacattggtcagctgacttgcaaactcttctaaggccacttagattttctttttcaagtttgggttgtggcctggcatggtgatgtctgtaatcccagcagtttgcaaactgaggcaagagaatcgcttgaggccaggagtttgaggccagctagagtgacatagcaagactccgatgctacaaaaaagaataataatagtaattaactaaataaaatttgagctgaaatgtttttattctatgacctattctctctcgttttttttttttttttttttgagacagggtcttgctctgttttgcctgctggagtgcagtggtgcaatctcggctcactgcaacctctgcctcccaggttcaagtgattctcctgcctcagcctcctcagtagctgggattacaggcctgtgccaacatgcctggcaaattgttgtatttttaatagagatggggtttcaccatattggccaggctggtcttgaactcctgacctcaggtgatccacctgcctcgcatttccaaagtgctgggattataggagtgaaccaccacacctggcctttcattttgataagtaacatttttgccattcccagctctttggaaggctgaggtaggaggattgcttgagatcaggagttcaagaccagtttaggtaaaatagtgagagctttctcaaaaactaaaatatttggaagggtaaagcaggcaaatcatttgagcttaggagttcaacaccagcctgggcaatatggcaaaaccccgtctctacaaaaagtacaaaaatttaccaaaggtgttgaatgagaattgaaaatatgtatacatagaaaaattagccagacatgttggaccatgtctgtagtcccagctattcaggaaggctgagatgggaggatcacctgagcctgggagttcaacgctgcagtgagccacgatcgtgccactgcactccatcttggacaacagagtgagactgtctcaaaaagtaaaataagtggatgggcccggtggctcaagcctgtaatcccagcactttgggaggccgaggcaggtggatcacgacgtcaggagatggagaccatcctagctaacacggtgaaaccccatctctactaaaaattcaaaaaaattggccgggcgcggtggctcacgcctgtaatcccagcactttgggaggcccagtcaggtggatcacgaggtcaggagatcgagaccatcctggctaacatggtgaaaccccgtctctactaaaaatacaaaaaattaccggggcgtggtggcgggcacctatagtcccagctactcaggaggctgaggcaggagaatggcatgaacctgggaggcggagcttgcagtgagccgagattgcgccactgcactccagcctgggcgacagaacaagactccgtctcaaaaaaaaaaaaaaaaaaaaaatagctgggcgtggtggcaggcatctgtagtcccagctactcaggaggctgaggcaggagaatagcgtgaacccgggaggtggagcttgcagcaagcagagattgcaccactgcactccagcctgggcaacatagtgagactccagctcaaaaaaataaataaataagtaacatttttgttttgatttttttaagtttttttttgagacagagtttcgctcttgttgcccaggctggagtgcagtggcactcgccccaaccaccgcctcctgggttcaagcgtttctcctgtctcagcctcccaagtagctgggattacaggcgcatgccaccacgcccggctaatttttgtattttttagtagagatgagatttcatcatgttggtcaggctggcctcaaactcctgacctcaggtgatccgcctgcctcagcctcccaaagtgctgggattgcagacgtgagccaccgtgcccggccctcgttccctattaaaaatacaaaaccaggcaattgacagtgtcatgactattgggatgttacagggaagttttttgtaaaacaacctgtttaccagatgagcattgtaagttactggaggtggcttggaaggataaagcattttctggtctggaaatctatatggaatcatagattctggttatgttgtacttcagtaaccctgaaacagaattctatgaaaagaagtaagttagtgtacacagctggtacttagctaggttatggtaaattgtatttttgttgttgttgttgttgttgagacagagtctcactctgacacccaggctggagtgcagtggcacgatttcggctcactgcaacctctgcctcccaggttcaagtgattctcttgcctcagcctcctgggtagctgggattacaggcatatgccatgatgcccagctagtttttgtatttttagtagagatggggtttcaccatgttggccaagctggtctcaaactcctgacctcaagtgatcctcccacctcggcctcccaaagtgctgggattataggtgtgagccactgcgcccggccaatatttttttttttttttttttttttttgagacagagtttcactctattgcctaggctggagtacagtggcatgatctcggctcactgcagcctctgccacctgggttcaagcgattctcctgcctcagcctcccaagtagctgggattacaggcatctggcactgcgtccggctaattgttgtatttttagtagagacgggatttcactatcttggccaggctggtcttgaactctttgtgatccacctgccttggcctcccaaagtgctgggataataggcgtgagccaccacacccggcctcaatactttttattttttttaagtgtaatttatggccggcgcagtggctcacacctgtaactacaacactttgggaggccaaggtgggaggatcgcttgagtccaggagttcgagaccagcctaggcgacatggtgaaatcctgtctctacaaaatacacaaaattacaaaatacacaaaaattaatcgggtatggtacacacctgtactaccaactattcaggaggctgaggtggaagaattgcttgagcttgggaggttgaggctgcagtgagccaagactgcatcactgcactccagcctaggtgacagagcaagccccgtctcaaaaaattaataaggctggatgcggtggctcacgcatgtgatcccagcactttgggaggctgaggtgggtggatcacaaggtcaagagctcaagaccatcctggccaacatggtgaaaccccgtctaacaaaaattagctgggcgtggtggcgcacgcctgtaatcccagctacttgggagactgaggcaggagaatcacttgaacccgggaggtggaggttgcagtgagccgagatcacgccactgcgttccagtctgggcaacagagtgagactccgtcacacaaaaaaaaaaaaagagaaaaaataaataacataaaactgaagtattaagggagtgatgctacctcaggggcctgtggcaagttaataaaaccaggtggtaaaacaactatctttgtttgtgatacttgtttttgtgtgtttgctactttcaaattttggcatttgacccttgcattcataatcagtgggttgaacaggtgttggtttaagtcagcatctcacttttacagaggaaaagctgaggttcagaaaatttatttttccaaggctgtggcaggaccaagattcgaactgtaactcccagctctgtgacttaatcctcaaacttgtggactttgatcctaataattcttgtcagaaatagttaaatactgctatcagttgccataaataaaaattggatatagaaatacatatataaagccgggcgtggtggctcacgcctgtaatcccagcactttgggaggccgaggcgggcagatcacaaggtcagaagatcgagaccatcctggctaacacagtgaaaccccgtctctactaaaaatatttaaaaaattagccgggcgtggtggcaggtgcctgtagtcccagctactcgggaggctgaggcaggagaatggcgtgaacccgggaggcggagcttgcagtgagcggagatcgagccactgcactccagcttgggcgacagagtgagacttgtctcagaaaaaaaaaaaacaaaaaaaaaaaccagacatatataggctgggtgcagtggctcacgcctataatcccaacactttgggaggccgaggtgggcagatcatctgaggttgggagttcgagaccagcctgaccaacatggagaaaccccatctctactaaaagtacgaaattagccaggcgtggtggcacatgcctgtaattccagccactgaggaggctgaggcaggagaatcgcttgaacccgggaggttgtgatgagctgagatcgtgccattgcactccagcctgggcaacaacagcaaaactccctctcaaaaaaaaaaaaaaagaaaaaagaaaaaaagaaatacatatataaaaaagaaatgcaataaaaccaaaagacacagcctggataacatagcaacacctcgtctctactaaaaataaaaataggccaggtgtggtggctcacatctgtaatcccagcactttgggaggccaagacgagtgggtcacctgaagttaggagttcaagaccagcatgggcaacatggtaaaaccccgtgtctattaaaaatacaaaaaattaaccgggcatggtggcaagcacctgtaatcccagctactcgggagtgagccgagatcatgccattgcactccagcctgggcaacaagagcaaaactccgtcccaataaataaataaataataattaaaaaaaaaatagccaagtgagacggtgtgtgcctgtggtcccagctacttgtgaggctgaggtgagaggatcccttgagcccaggagtttgaggctgcaatgagcttggtcatgccgctgcactccatcctgggccacagagtgagacactatctcccctctaacccccaaaaatgaaaggaaacaaaagacgtcgagatgatactaactaaatgctatctctacaccattacctgccaaaaatctctgtccccaaatctgccctctgttagacattagccaacttcagggaagggttttaaggtgtcatcaaagacacttgtttctcattgatcagaagtattggaaagggtccacaccatcattgcttgagtcagttattaaatgccacttttgacttctcgccagggtgtgttccaggaagatcatctgaagctgctgggagcttgaagctgagggcagtggtcggcgctgttggtaggaattgtggagcttgggcagcctgaaggctttgtgtcttggctttgggcagagggtcagcttttcccagaggtctcactgtacttcagcccatgctctggtgtaaggcagaggacaggaggcataagtgggctttaaagccaggatttggaactcagcttttacacttccttgctttgtgagtgaagtcacttctccatgctttgggctccttatctctaagtgtgggcttgtcagaaaaatttaaaagcccactaaagcacttggtacagagtaggcattcacagtctgtggtgcggctgtgcagggaagattatggctccgaatccatgctgtgaccttcctaagtggttgtggaggggctgatgcaccctgcctagtggtgcagggccaccatgtagggagggcccaatgtctgataggatagagccaaggcacgcttctttctcagatccaagtgacagccgaatctaatatgaacatttctgagttctcccccacaccttgttttcagggacggtctcactctctctcccaggctggagtgcagtgatgcaatctcagctcactgcaacctcgacctccctggactcaagctgtccacccacctcaggctctcaagtagctgggactacaggtgtgcaccaccatgcccagctaacttttgtgtattttttttgtagagacagggtttcgctatgtcacccaggctgttctcgaactcctgaattcaaatgatcttcccacctcggcctcccaaagtgctggattacaagtgtgcatcactgcacccggcctgagttctcccttgaaaaaaaaggcgggggcgggggggagcagtttggagatagggtctcgctgtgtcacccaggctggagtgcattaacgacccattgcagcctcgacctcttggattcaagcaatcctcccacctcagcctcccaagctgctgggaccacagacacacaccaccacaccggctaattttttaagttatttgtagagatgagatctcactgtgttgcccaggctgatctcaaactcctgggctcaagtgattttcctgcctcagcctcccaaggaaataaaatattcttggattcttggttagctttaattatttccgctttccaggctagcccaggagttgccctccagcacgtcctttgaaaagtacttttcggccgagcgtggtggctcacgcctgtaatccaagcactttgggagaccgagatgggaggatcacctgaagtcaggagttggagaccagcctgaccaacatgacgaaaccctgtctctactaaaaatacaaaaattagccgggcatggtggtgggcgcctgtaatcccagctactcaggaggctgaggcaggagaatcacttgaacctggaagacggaggttgccgtgagccaagatggtgccattgcactccagcctgggagacagagcaagactccgtcttaaaaaaaaaaaaaaaagtatctttcccactgttgtgattagaaagaccagcagagggcatcagagacttagttcggagacagaacgtagctgattccatcctgccttacttagcccccatggaatggctcaacgcaggttccttttgtccgcgggcagcagcaagtggaggtcgtgcagcttccacttgcaccagtttactgtgccttggaattggatagatgatggcagaagtcgaggccccacggaggggccaccttcatctctggaacctgcacctttacctacttatgtccacaaaaagagtcagactctgaatctttttttgtttttttttttgttttgttttgttttgagacggagttttgctcttgttgcccaggctggagtgcaatggcacgatcttggctcaccgcaacctctgcctcccgggttcaagcgattctcctgcctcagcctcccaagtagctgggattacaggcatgagccaccatgcccggctaattttttgtatttttagtagagacggggtttctccatgttggtgaggctgctatcaaactcccaacctcagctgatccacccacttcggcctcccaaagtactgggattacaggcgtgagccaccgcgcctggcccagactccgaaaatatctgaagagatttattctgagccaaatatgagtaaccaatggcctgggacacagccctcaggagatcctgagaacatgtacccaaggtggttggggcatagtttgcttttatacattttagtgagacatgagacatcggtcaatatgtgtaagatgggctgggggtgccctggctcacacctgtaatctcagcactttgtgaggccgagaggggcagattgcttgagcctagaagttcaagaccagtctgggcaacacagtgagactctgtctctacaaaaaaatacaaaaactagccagatgtggtggtgcgtgcctgtagtcccagctacttgggaggctgaggtgggaggatcacctaagttagagaagttgaggctgcagttgaccacgctgatctcgaactcctggcctcaagcaatgatcctgcctcagcttctcaaagtggtgggattatagacgtgaaccaccacacccagccaacagaagttctttgttttttttttttggtcccaaactttaccgttgacaaccgaagtattttaaagcaaatcccagatatcctgtcatattacccctataatttcattttctttcttcctttttttttttttttttttgagacagattctcgctctgttgcccaggctggagtgcagtggcatgatctcgactcactgcaacctcccaggttcaagcaattctcctgtctcagtctcctgagtagctgggactacaggtgcacgccaccacgcccagctagtttttgtatttttagtagagacagaggtttcaccatattggtcaggctggtctcgaattcctgacctcaggttatctgccccctttggccccccaaagtgtttggattacaggtgtgagccaccacgtctggcctataatttcattttcttatatcatgacactaccattatcacacctatcaaagtccacaattattatttggtatcatctgatattacatttccctgaggatctcaaaagtgtccttttacacttggtttgtttgattcatgatccaaacaaagttcacatactgtatttcgttgttgtgatttttcagtctctcttttttaagacggagtctcgctctgtcgttcagactggagtacagtggcacaatctcacctcattgcatcctccgcctcctggcttcaagtgattctccctgcctcagccttttgagtagctgagattacaggcacccaccaccatacccggctaatttttgtattttcagtagagatgaggttttgccacattggccaggctggtcttgaactcctgacctcaggtgatcctccctcctcggccttccaaaatgctgggattacaggcatgagccactgcgcccaaccttaagtccttttttttttctttttgagacagagtcttgctctgtagcccaggctggagtgcagtggtgcgatctcggctcactgcaacctccacctcccaggttcacaccattctcctgcctcagcctcccgaatagctgggactacaggctcccaccaccacacccggctaattttttttttttttgtatttttagtagagatggggtttcaccatgttaggcaggatggtcttgatctcctgacctcgtgatccacccgccttggcgtcccaaagtgctgggattacaggcctgagacaccatgcccggcctcttaagtctcttttaacctagaagagtgccccctatgcatacacttttgatgtgttgcagaaaaccactttttttttttttctgagacagagtctcactctgtcgcccaggctggagtgcagtggcgtgatctcagctcagtataacctccccatgccgagttcaagtgattctcctgcctcagcctcctgagtagctgggattacaggcacctgccaccacgcccggctaatttttgtatttttattagagacagggtttcaccatgttggtcaggctggtctcaaactcctgacctcaagtgatccacccgcctcaccttcccaaagtgctgggattacaggcatgagccactgtgcccggcccaattttatcacttctgatgggtgcccaggtcaatcgtttcattaatagctgtacaaagaagccagttcttttgttcttgcaatcttatttatagctggtgagccacaggcatttcacatttcctgttactgattcaccaggtgaacaaataaaaacctgaaagagccagtccttcaagatggatctggagtggcagactgggcttcaattttaagtacacccaagcaaccatttgctgaatagaggtcacacatgtattctgagttgccccaaaactcacgcctccgttttaacttttggacattcagaggtctcctggaccaatcagtcagaactcagatgtgtcaaccagtaaaaactaggcaagtttgactccctgatttgcataaacagacttgagtgggaacctgggctggaatttttgctataatacctgaaccctcgggaggctaaggcaggagaattgcttcaacccaggaggcagaggttgcagtgagctcagattgcgccactgcactccagccagggtgacagagccagactgtctcacaaaaaaaaaaaaaaaaaaaaaaaaaaaaaaaaaaaaaaaaaaaaacctgaaccctccctttgttctctggaatgcaccttcattttacaccaaatactgtgtctcttcagtttgcaaactgttgactggaatacaatctattccctccaaattccttttcagagaacattggttcacaatcatgtcctaccagaaggagtttctggggaattcacagccatctacagaagacatccttgacttgccttttgaggtttccctcagggcagccacaaggatgctgtgttcctttcccatgttgtggcaggccacagtgacaatttctttttctttttcttttttttttttttgagatggagcctcgctctgttgccaggatggagtgtagtggcgcagtcttggcttactgcaaactccacctcccaagttcaagcgattctcctgcctcagcctcccaagtagctggaactagaggtgcatgccaccatgcccagctaatttttgtacttttagtagagacggagtttcagcatgttggccaggatggtctcgatctcttgacctcgtgatctgcctgcctcggcctcccaaagtgctgggattataggtgtgagccaccatgcctggcccacagtgatgattatgaatagctattcattatttgaaaatgaatagtatctgaagtatctgagacaggtctccatcaaattagaaattcattttgccaaggtttaggacatgcctggaagaaataaacacagggccaggtgcagtagtttacacctgtaatcccagcgttttgggaggccaaggcgagcagataacccgaggtcaggagtttgagaccagcctggccaacatggtgaaaccccatctctactaaaaatacaaaaattagccgggcgcggtcgtgggcacctgtaatcccagctactaaggaggctgaggcaggagaatcgctgtgcaccactgcactccagcctgggcaacagagggacagaaagagacagagagacagagagagacagagggaggcagggagggagagagggaggagtggggcagggagggagggaaaggaaaggaaaggaaggaaagaaaagaaaaagagaaaaagaacgaaacatagaatcacggacacagttcataatctgtgtctttctccaaaaattattttgagggcttcagtatttaaaggggaaaagtgggctggagggcaaatgggagagtaatgtgtccatgtgtaataaaatccatatatgtaatgtatcccaaatgtatccatatgtaattcacatattcctacagaaaaggagcaggtagggggatagtcaattatgtattcgtctggcgcccagtaaatggtcactttccataagataaagtgaacacagggtaggtacctatggagcttttttttttttttttgagatggagtctcgctctggcgcccaagctggagggcagtggcaggatctcggctcactgcaagctccgcctcccgggttcaggccattctcctgcttcagcctccccagtagctgagactacaggcgcctgcaaacacgcccagctaattttttttttttgtattttttttttgtatttttagtagagacggggtttcactgcgttagccaggacggtctccatctcctgacctcgtgatctgcccgtctcggcctcccaaagtgctgagattacaggcgtgagccaccgcacccggcagattttttttttttttttctttgagatggagtctagctctgtcaccaggctgaagtgcagtggcgcaatctcggctcactgcaacctccgcctcctgggttcaagcgattctcctgcctcagccttctgagtagctgggactacaggcatgtgccaccaggcccagctaatttttttttttttttcatggagatggggtctcaggcttttgtctcgaacccctgggccaagtgatcctccaacctcagcctcctgagcagctagttcttttctagtgtaatatattatcttacggaatatattccattgtctgcatggaccccagttggtttattcacccatctacttagtgacatcttggttatttcaaagctgacatggtaggtattactggtcgccttacaggggaacagcaggacatctgtagtgtgtggtgaacactagagggagcaagaaccccctttctctatcaggtgggtgttacccatttcccagctgcactaatctgtcgttccttgtagaggcctgatctggtgtttgccctgaatgagagatgatctggaaaccatttgtgggaaaattaagttagacatccttccattgaaataaaatgcaggggccgggcacagtggctcacgcctgtaatcccagcactttgggaggccaagtcgggctgatcacctgaggtcaggagttcgagaccagccaggccaacatgactaatttttttgtattttcagtagagacggggtttcaccgtgttagccaggatggtcttaatctcctgaccttgtgatccgcccgcctcggcctctcaaagtgctgggattacaggcgtgagccaccgtgcccagccttgcagcaaataattacatgaaaaaataattaatttaaattctggcaagttctttgaatcaaaaccagggagaggtgctctgctctaataacccagctcttgtggatgttattcatgctaaaacttgtaggattttccattgcttgagttctgctgtagtgttattgcttatcagtgtaggatctgtgctctgtggattggtttaaactttactcgtgggacagctggctttgaaaagttttcatcatcccctgcagggactgcactggtctttgttgaggcacatctaatgttgatagctctgtttcctcccagctggggctccaatctgtgaccttgcttaggtagtgatgctctgaaaagtctccctatttcttctgagaacagttagatattgggtgtaggcttttgaaataatatgataggcctcactctgtaggggtttttacaaaagccactataggctggacgtggtggctcacactgtaatcccagcacattgggaggctgagatgggaggattgcttgagacgaggagtttgagaccaggagtttaagaccagcctggtcaacatagtgacacctccatctctttaaaattgttgtttaattatataaaagccactgtagagtttgaatgctttcaaaatatcaagaggatgaccacaatgaagtaaactgtcacggtggggcacagtgcctcatgcctgtaatcccagcactttgggaggctaatgtggatggatcccttgagctatgagtttgagactgacctgggcaacatagggagaccccatctctactaaaaatatgaaaaatttagtaaaaaccctgtctctactaaaaatacaaaaattagccagatgtgctggcatgtgcctgtagtcccagatactggggaggctgaggtgagagaatcacttgaacctgggaggcagaggttgcaatgagctgagatcatgccactgaactccagcctgggcaacagagcaagactccctctcaataaataaataaataaataaacaaataaataaataaatactaaaataaaatatagccagggcacagtggctcgcacctgtaatcccagcactttgggaggccgaggtgggcagatcatgaggtcaggcgttcgagaccagcctggccaacatggtgaaaccccatctctactaaagatacaaaaagttaggcatggtggtgggtgtctgtaatcccagttactccggaggctgaggcaggagaatcgcttgaacctgggaggcagaggttgccgtgaactgagatcgcgccactgcactccagcctgggtgacagaccaagactccctctaaaaaaaaaaaaattacctgagtgaggtagtgtgctcctgtagtcccagctacttgggaggctgaggtggaggatcacctgagccccgcaggttgactccatagtgagccatgatcatctcactgcactccagcctagttgaacagtgagactctgtctcaaaaaaaaaataaaaataaaaaaaaagagggagaggctgggtgtggtggttcatgcctgtaatcccagcactttgggaggccgaggcaggtggatcacgaggtctggagatcaagaccatcctggctaacacggtgaaaccctgtctctactaaaaatacaaaaaattagctgggcgtggtggcacgtgcctgtagtcccagctactcgggaggctgaggcaggagaatcacttgaacctgggaggtggaggttgcagtgagctgagatcgcgcccttgcactccagcctgggtgacagagcgaggccccatctcgaaaaaaaaaagagggagagataacatgtcacacccatgagaatagctagtaaaacaaaacaaggctgggtgctgtggctcatgcctgtaatcccagcactttcagaggccaaggcaagaggaccacttgaggccaggattttgacaccttcctgggccagagagcgagatcctatctctaaacaaaaaaaaatatttttttttttgaaatggggtctcactctgtcgcccatgctggagtgcagtggtgcgatctcagctcactgtaacctctgcctcctggattcaagcgattcttgtgcctcagcctcgcaagtagctgggattacagatgtgtgccaccatacctggctagtgttttgggttttttttttttttttgcttttttttgagacacagtctcattctgtcgcccaggctggagagcagtggcgtgatctcagctcactgcaacctctgccccctggattcaagcgattcttgtgtctcagtctccaaagtagctgggattacagacgtgtgccaacatggccggctagtgttttgtttgttttgttttgtttcgttttgagacagagtctcattctgtcacccaggctggagtgcaatggcatggtatcagctcactgcaacctccacctcctgggttcaagcaattctcctgcctcagcctcctgaatagctgggattacaggcacacaccaccacacctggctaatttttgtatttttagacagacggggtttcaccatgtagaccaggctggtctcgaactcctgacctcaggtgatccgcctgccttgtcctcccaaagtgctgggattatgggcataagccactgtgccagaccaaaaaaaattttttttaattagctaggtgtggtggcgcatgcctgtggtcccagctattcaggaggctgaggcgggagaaccatttgagcccaagaagttgaggctgtggtgagctttttttttcatttttggagaccttccaaaaaagaaaaaaaaaaagctcctttaatgcagatgtttgctatcagctaatggccatttgcctctgtctttttcaatttgcgccctgctgctttccacaaaggttgcaccattttacattcttaccaatcatgctgcacagcactccgagttctctatgtcttcacccatacttgttattttctgttgtgttttgtttgggtgtgaagtggtatctcattgtggtcttgatttgcatttccctaatgataagcgatgttaagaaaatatttcttatttaaaaatgctttctttttttttgtttgagacagtctcgctctgtcgcccaggctggagtgcagtggcgtgatctcggttcactgcaacctcagtctcctgggttcaagtgattctcctgcctcagtctcccgagtagctgggattacaggtgcccgccaccacgcccggctaatttttgcatttttagtacagacagggtttcactgcattggccaggctggtctcaaactcctgacctcaggcgatccactggcctcagcctcccaaaatgctgggaatacaggtgtgagccaccatgctcgcccaaaaatattttaaggtgaaggctgggtgcagtggctcaagcctctaatcccagcactttgggaggccaaggggtggggggggggggtgggtcacctgaggtcaggagttcgacaccagcctggccaacatggtgaaactccgtctctactaaaaatacaaaattagctgggcatggtgcacacttctctagtcccagctacccaggaggctgaggcaggagaatcgctggaacctaggaggcagaggtgccagtgagccaagattgcgccactgcactccagcctgggtgacagagtgagtctccgtctcaaagaaaaagaaaaaagaaaaatggaccaggcgccgtggctcatacatgtaattccagcattttgggaggccgaggtgggcagatgacttgaggtcaggagttcgagaccagcctggccaacatggtgaaaccccatctctactaaaaatagaaaaaatttgccgggcatggtggcaggcacctgtaatcgcaggtactcgggaggctgaggcaggagaatcacttgaacccaggagacggaggttgcagtgagtcaagattgtgccactacagtccaacctaggtgacagagcaaatctctgtctcaaaaaaaaaaaaaaaaacaactccgggcacggtggctcacacctgtaatcccagcactttgggaggccaaggcgggctgatcacgaggtcaggagatcgagaccatcctggctaacacggtgaaaccccatctctactaaaaatacaaaaaattagccgggcatggtggcgggtgcctgtagtcccagctactcgggaggctgaggcaggagaatggtgtgaacccgggaggcagagcttgcagtgagccaagatccgccattgcactccagcctgggtgacagagcgagactccgtctcaaacacacacacacagacacacacacacacacacaaagaaaaatcaattaaattaaatgttttgttttgtccactggttctcaagcaggggaaattttgacctccctggaaatatttcacaatatctggagacatttctagttgtcagaactggaggaggggtgttactgggactaatgagctgctaaacattctaccatgtacaggaaatccccctcaaccaagaagtaactaagccaaaatgcctataatgccaacattaaaattcctggaatagctcttttagttcgcagcaggagggtagactacacaacctggtttgctatcagatcaaacaaacaaaaatcttcataatcagaaattaaaatatttggccagacacggtggctcaggcctgtaatctcagcactttgagagtctgaggcaggaggatcacttaagctgaggaatttgagaccagcctggacagcataatgagacccctctctacaagaaaattaagaaaaaaggctgggcacagtgcctcacgcctctaatcccagcactttggcaggctgaggcaggcggatcacctgaggtcaggagtttgacatcaacctggccaacatggcaaaaccctgtctctactgaaaatacaaaaattagccgggtatggtggggggcaccaaataatcccacctacttggaggccgaggcaggagaaccacttgaacctgagacacagtggttgcagtgagccactgcactccagcctgggtaacagaatgagactccatcccaaaaaagaaaaaaagaaaattaagaaaaaaaaaatgtcattaacattccagtactggccgggcctggtggctcatgcctgtaatcccatcactttggaaggccgaggtatagatataaggatcacctgaggtcaggagttcgagaccagcctggtcaacatggtgacaccttgtctctactaaaaatacaaaaattagccaggcgtggtggtgggcacctgtaatcccagttactctgggggctgaggcaggagaatcgctggagcctgggaggcacaggttgcggtgagacgagatcacaccattgtactccagtgtgggtgaaagagtgagaccctacatcaaaaaaaaaaaaaaaaaaaaaaaaaaaaaaaggccaggcgcagtggctcatgcctgcaatcccagcactttcagaggccgaggcgggcagatcacaaggtcaggagattgagaccatcctggctaacacggtgaaaccctgtcttttctaaaaatacaaaaaattagccaggcgtggtggcaggcgcctgtagtcccagctactcaggaggctgaggcaggagaatggcgtgaacccaggaggtggagcttgcagtaaaccaagattgcaccactgtactccagcctgggtgacagagcgagactccatctcaaaaaaaaaaaaaaaaaaggaaaaccagatttggcaccccaaaagaacagcttttcttccaagtgaggcctcttggcagtaattcccacgcctgctggctgactcactgccacctggtgccttcctaattccattctgtcacgtggaacacgaaactaatctcagaaggtcccacgatgtgagtccatgacaagcacctccgcgtcccctcgctttggaaatagcccagaaatacagaagccatatatatttttcttttttctatttgagacacaatctcactctgtcgcccaggctggagtgccatggtgcgatctcggctcactgcaacctctgcctcctgggttcaagtgattcttatgtttcagcctcccgagtagctgggactacaggcacgctgccaccatgccagctaatttctgtatttttagcagagacgggatttcaccatgttggccaggctggtctcgaactcctaacctcgggtgatctgcccacctcagcctcccaaagttctaggattacaggcttgagcccccacacctggcccagaatccatgttcttaatcagatgaaatcagtctcttaaatttcccagggcgacccgatcagcagtcaattctcagttaactggggctgattcttttcgtttgaagatttctcacatctctcagctggcacctgaaactgatcacaaggacctaggcagagttcagtggtggatagctgggtggcctggagtattgctgtttatgactttttaaaaaattctgcaggctgggtgcagtggctcacacctgtaatcccagcactttgggagggcaaggcaggtggatcacctgaggtcaggagtctgagaccagcctgaccaacatggtgaaaccccatctctactaataatacaaaaattatctcggtgtggtggcacgtgtctgtaatcccagctactcaggaggctgaggcaggagaatcgcttgaacctgggaggtggagggtgcagtgagccaagatctcgacactgcactccagcctgggcgacagagtgagactctgtctcaaaaaacaagaaacaaacaaacaaaaaaattgtggtaaagctgggcatggtggctcacgcctataaaatcccagcactttgggaggccaaggcaggcggatcacctgaggtcaggagttcgagaccagcctggccaacatggtgaaaccttgtctcttctaaaaatacaaaaaaaaaaaaaaaaaagctctgtcattgtggcatgcacctgtaatcccagctactcgggaggctgaggcaggagagtagcttgaacccgggaggtggaggttgcagtgagctgagattgcgccactgcactccagcctgggcgacagggcaagactccgtctcacaaaaacaaaaaaaaaaaaaaaaagaagaaggccgggcgcagtggttcaggcctgtaatcccagcactttgggaggcagaggcgggcagatcacgaggtcaggagatcgagaccatcctcgctaatatggtgaaaccccgtctctactaaaaaaaaaaaatacaaaaagattacccgggtgtgtggtgggcgcctctagtcccaggtactcaggaggctgaggcaggagaatggcgtgaacccgggaggcagagcttgcagtgagccaagatcgcgccactgcactccatcctgggcgacagagtgagactccatctcaggaaaaaaaaaaaaaaaaaggctgggtacggtggctcatgtctgtaatcctagcactttgggaggccaaggcaggaggaccacttgagcccaggtgtttgagaccagcctgggcaacatagcaagatgtatctctaaaaaaaaaagttcaaaaattagctgggtgtgctggcaccaacctgtagtgggaggctgaagtaggaggatcacctgacccctgggaggttgaggcttcagtgagccatgatcacaccatgacattccagcttgggcaacagagtgagaacctgtgccaaaaaaaaaaaaaaaaaaaaagagaaaaaaattgtggtaaaatacacattacataaaatttcccttttctttgagacagggtcacactccattgtccaggctggagtgcagtggcacaaccttggcttgctgcaacctctgccacccatgttcaagtgattctggtgcctcagcttcccgagtagctgggactacaggcatgtaccaccacacctggctaatttttgattttttttttttttggtagtgatggagtatttttggtagagacaggttcttttgggtatttttggtagagatggggttttactatgttggccagcctagcctcaagtgatctgctcacctcggcctaccaaagtgctgggattacaggggtgagccatcgtggccagaccaattttttatttttagttgaaaaaaggtcttcctctgttgcccaggctggtcttgaactcctgggctcaagtgatccccccacccgggcctcccaaagtgctgagattacagatatgagccaccatgcctagccttattttatttttaacagtagctctcctaatggtgtgaggtggctgccacttctgaatttttttttttttttttgagacagagtctcgctctgttgcccaggctggagtgcagtggcacgatctcagctcactgcagtttctgcctcctgggttcaagcaattctcatgcctcagcctcccaagtagctataaccacatctggctaatttttgaatttctagtagagatgggttttcaccattttggccaggctggtctcaaactccttgcctcaagtcatctgcccccgtaggcttcctaaagttgtcacttatgattttttttttgagacggagtctcgctctgtcgccaggctggagtgcagtggcgcgatcttggctcactgcaagctcagcctccgcctctgcctcagcctcccaaatagctggaactacaggcccaagccaccacacccagctaatttttgtatttttagtagagatggagtttcagcatgttggccagaatagtctcgatctcttgaccttgtgatccatctgcctcggcctcccaaagtgctgggattacaagcatgagccaccgtgcccagccttttctttttttttttttgagacggagtctctttctgtcgcccaggctggagtgcagtggcacaatcttggctcactgcaagctccgcctcccgggttcaggccattctcctgcttcagcctccccagtagctgagactacaggcgcccgccaccatgcctggctaattttttgtatttttagtagagacggggtttcactgtgttagccaggatggtctcgatctcctgacctcgtgatccgcccgcctctgcctcccaaagttctggcattacaggcgtgaaccactgcgcccggctagcctttttcttttttaattgagatggagtttagctcttgttgcctaggctggagtgcaatggcgcaatctaggctcactgcaacctctgcctcctgggttcaagcaattctcctgcctcagcctcctgagtagctgggattacaggcatctgccaccatgcccagctaatttatttatttttagtaaagacggggtttcttcatgttggtcaggctggtctcaagctcccgacctcacgtgagccacccgccttggcttcccaaagtgctgggattacacacttgagccaccgcgcgcctggccgatttttttttttttttttttgagatggagtcccattttgtcgcccaggctggagtgcaatggcacgacctcggctcactgcaacctctacttcccaggttcaagcgatcctctttcctcagcctccagaatagctagactacaggtgtgtgccaccacatctggctaatttttgtattttttttttagtagaggcggggtttcaccatattggccaggctggtctcacactcctgatcttgtgatctgtgtgccttggcctcccaaagtgctgggactagaggcgtgagccactgcacccggcctacacttacgatttttaagaggctgttgctgtcttctgttttcagagaagtgcatttcaagtttacaaaattgcctagcatggtggctcatacctttaatcccagcactttgggaggctgaggtgagaggattgcttgagctcaggagatcaagaccagcctgggcaacatggtgaaacttcatctctacaaaaaataaaaaaaattaaccaggtgtggaggtgcgcaccagtagccccagctactcaggaggctgaggcgagaggatggcttgagctctggaggttgatgctacagtgaaccatgattgtgctactgcactccagcctgggtgtgaccaagtgagaccttgcctcaaaaagtaactaactacctacctaattaaatgtttacaaagtcactagaagaatttgtgtgcagccccagggaaaagtaatagctggataagcccagaacagcaaaatgctttttctgagagaagcagacctgctgaggcccagactcactcttctcagactgagagcacatctgcaggtgatgtttgggaaaccccggcttggcttgccttgggacacttccagtagctccagttcagggttggaaaacctgttctgccactgtcttgtggatgccactcccaggtttatatatttatttattttttgatggactttcactcagtcacccaggcaggagcggagtggcataatctcagtcactgcaacctccgcctcccaggctggagagattctcctgtctcagcctcccgagtaaaactgggaccacaggtgcccgccgccaagacttgctaatttctgtgtttttagtagagacagggttttcccatgttggccaggctggtttcaaactcctggcctcaagtgatctgcccgcctcagcctcccaaagtgctaggattacaggaatgagccaccacgcccagcgcaatcttaggtggattttctccattttacttgtactcgtgtgtgtgtgtgtgtgtgtgtgtgcgcgcgcgcgcgcgtgtgtagtaaattgtatacaatttgcttcctatgtaggtttgcatattcacgcccacattcaaaatactgatcatggctgaggcgagtgggtcacttgaggtcaggagtttgagatccaccaggccaacatggtaaaactcaatccctactagaaatacaaaaattagccgggcgtggtggtgggctcctgcaatctcggctatttgggaggctgaggcaggagaattgcttgaacccaggaggtggaggttgcagtgagccaagattgcaccactatactccagcctgggagacacagcgagactccatctcaaaacaaatcaaatcaaaacaaaacaaaacaaaaaaatttaatcagatagtatgtaacatttttgagattggcttcccctccccggttcccgcccaaagcataattccctagagattcattcatctcgcctgggtgccgtggttcacgcctgtaatcccagcactttgggaggccgaggcgggcagatcacgaggtcaggagattgagaccatcctggctaacacggtgaaaccccgtctctactaaaaatacaaaaaattagccaggcgtggtggcaggtgcctgtagtcccagctactcaggaggctgaggcaggagaatggcgtgaacacaggagacagagcttgcagtgagccgagatcccgctgctgcactccagcctgggcgacagagcaagactccgtctcaaataaaaaaaaaaaaaaagagagattcattcatctcatctgttgtgcatctcaatagtttattcctttttatttatttttttgagactgggtcttgctctgtggccctggctggagtgcagtgatgaaatcatgactcacacagccttgatctcctggcctcaagtgattctctctcctcagccttccgagtagctgggactataggcatgtgctgccacgcctcgcttatttttaaaagttttctagagatactgtctccctatgttggccaggctggtctaaaactcttgggctcaggcgatcctcctaccttggcctccaaaaatgctgggaatacaggcatgagccaccgcacccagtttggtgattactcttggtggagacccaaagtgccatcattcagagccagaatcttagaagagcttaataaattcaacttaagataaaacaatatagctaaaataaaacacctacaaaatttctaacaaatgtgggcagtcaggtttccatatgtagttggtagaagtgggatgcttagtataaacatgatgtgaaatgctggggatttcctgaattgtgttaaaaccacagctactggataaaataaagctattgccctgagtttctgtcttggaagaactgttttctgcatcgtacatctcactgctaggtttacggaaatcacctttttttttttttttgagacagagtctccctctgtcacaaggctggagtgcagtggggcgatcttggctcactgcaacctcacttctgcctcctgggttcaagcgattctcctgcctcagcctcccgagtagctgggattacagatgcccgccaccacgcccagctaatttttctacttttagtagagacagggtttcaccatggtggccaggatggtctcgatctcttgacctcgtgatctgcccgcctcggcctcccaaagtgctgggattacaggcctgagccctgccaattccttttttttttggagatacagtcttgctctgtcgccctagctggagcgcaatggtgcgatctcagctcactgcaacctctgcctctggggtttaagcgattctcctgcttcagcgttctgagaagctgggattacaggcatgcgccaccacgccggccaatttttgtattttttgtagagacaggatttcaccatgttggtcaagctggccttgaactcctgaccgtgtgatctgcccgccttggcctcccaaagtgctgagattacaagtgtgagccaccgcgcctgacctctttcttttttttctctttgagacagggtctcctctatcaccaggctagagagccttctgggctcaggtgattctcctgcctcagcctccggagtagctctgattacaggtgctcaccaccatgccatgctaatttttgtatttttagtagagatggggtctcgccatgttgcccaggctggtcttgaactcctgggctcaagcaatctgcccgtctcagactcccaaaataccaggattacaggtgtgagccactgtgcccaggcacaagaggtcatttttgatgaataaatgcacattttgttaactaatgagtgatttcatattccaaggaagatctggagatattactgaaaaggtgtttaacttgcagtggcaactgaagtcaatgtattttacattttcatgttctggacttgggtgagttgttatttcaagccctcatctttgagtaaaagagaagaatccacctgtaatcccagccactcaggaggctgaggtaggagaatctcttgaacctgggaggtgggaggtggaggttgcagtgagccaagattgagccactgcactccagcctgggtgacagggcaagactccgtctcaaaaaacaaaaaaaaaaaaaaaaaagaagaaggccgggcgcagtggctcatgtctgtaatcccagcactttgggaggccaaggtgggcagataacgaggtcaggagatcgagaccatcctggctaacacggtgaaaccccgtctctactaaaaatacaaaaaattagcctggcgtggtggcgggcacctgtagtcccagctactcaggaggctgaggcaggagaatggcgtgaacctgggaggcggagcttgcagttagcggaaattgcgccaaaaaaaaaaaaaaaaaaatccattctcctctgggatgattcccctcccccacttcccgttccctcctctcccctcccctcccctgccctgccctctcctccccttcttttttttttttttttgagatggagtctctgtcgcccaggctagagtgcagtggtgtgatcttggctcactgcaaccttcgcctcctgggttcaagcgattctcctacctcagcctcccgagtagctgggactacaggtgcttgacaccacacctggctaatttttgtattttaatagagacggggtctctcttttttttttttttttagagacagactctcgctctgtcgcccaggctggagtgcagtggcgggatctcagctcactgcaagctgtgcctcccgggttcacgccattctcctgcctcagcctcctgagtagctgggactacaggcgcctgccactacgcctggctaatttttttgtatttttagtagagacggggtttcactgtgttagccaggatggtctcgatctcctgacctcgtgatctgcccgcctcggcctcccaaagtgctgggattacaggtgtgagccactgcgcccagctgagacggggtttcaccatattgaccaggtctcgaactccatattgaccttgcgatcccagagaaagtgctgggattacaggcgtgagccaccgtgcctggttgagacagggtttcaccatattgacctggtctcgagctcctgaccttgtgatttgcctgcctcggcctcctaaagtgctggaattacaggcgtgagccactgcgcccagcctgtagatgttttttttttaaagtctggaagccaagggtgtcaatgcagacatggggccaaggtcccaggggcagttcattattaagaactgtgctcttaattgagacacctggcaaattttgtattgctttgtagagatggggtttcacaatgttacccaagctggtcttgaacgcctgtcctcaagtgatctgccagcctgggcctcccaaagtactgccattataggcatgcatgagctaccacaaccggcctgtttttcttttttgagacggagtttcgctcttgttgcccaggctggagtgcaacggcatgatctcagctcaccgcaacctctgcccgctgggttcaagcgattctcttgcctcagcctcccaagtagctgggattacaggcatgcaccaccacacccggctaattttgtatttttttagtagagacagggtttctccacgtcggtcaggctagtcctgaactcctgacctcaggtgatccgcctgcctcggcctcccaagtgctgggattacaggcgtgaggcaccgcgcctggcccggcctgtttttctttacactattgcatattagtgtgattagcataaaagacaattagagaacagtcataccatccactccatgggcagcaaccctgcctcctccatgcattgctgcagggtattcctagctcaatgcttagcatttggagagagcataagaaatactatttggccgggcgccttggctcacgcctgtaatcccagcactttgggaggctgaggtgggaggatcacctgagcccaggagtttgaaaccagcctggacgacatagtgtgactgtctctacaaaaaattttaagaaaattagctgagtgtggtgtcccacccttgtagtccaagctactcgggaggctgaggcaggaggatcgcttgagcccaggaggtcgaggctacagtgagtactgatcgtgccaccgcagtccaggctggatgacccagcaagcctgtgtctcaaaaacaaaaacaaaaaaacaaaaaaataactacttgaatgaatgaggaatcgagttcagatcccacttctacttgctcacttactgtgcactattcaataacactagctgaggatcagagagctagcaggtgggctacctgctgtcatgattcctcataaccaaacagtggaagtgggagccattattgtttctggtgggttttttttgttttgtcttgttttgtttttgagacggaatctccctctgtcaccaggctggagtatagtggcacgctcgactcactgcaacctccgcctcctgggttcatgcaattctgcctcagcctcctgagtagctggcactacaggcacgcgccaccacagccagctaatttttgtatttttagtagagatggtgtttcaccacattggccaggatggtctcaatctcttgacctcatgatccacctgccttggcctcccaaagtgttgggattacagacgtgagccactgggcccagcattttttttttttttttttttttttgagatggagttttactctcgtcacccaggctggagcgcaatgacatgatcttggctcactgtaacctccacctcctgggttcaagaaattctcctgcctcagcctgccgagtagctgtgattacaggcacctgccactatgcctggctaattaatttttttgtatttttagtagaaacggggtttcaccatgttggccaggctggtctcgaactccttacctcaggtcatctgcccaccttggcttccgaaagtgctgggattacagatgtcagccaccgcacccagccttattgtttgtttcacaggtgaagaaagtgaggtgtagatgctctggtaaacctgcctggtattacccatgcatcacccaggtagtagaaatggagtcgtgttttaaacccaggtccttctggggcctggcttggtggctcatgcctgtaatcccagtgcactgggaggctgagccaggaggactgcttgagcccagtagtttgagaccagcttgggtaacacagcagacctcagctctacagaacataacagacaaaaaaaaaaaaaaaaaaaaaaagctggtggtggtggcatgtacctgtagtcacagctatttgggaggctgaggtggatcccttgagtccaggagtttgaggctgcactgagctgtggttacaccattgcactccagcctgggttacagagcaagaccctgtctctaataaaacaaacaattaaacaaaaacccacccaggtgaggtggctcacgcctgtaatcccaacactttgggaggctgaggtgggcggatcacttgaggtcaggagttaaaaaccagcctggccaacatggtgaaactctgtctcaactaaaaatacaaaaattagccgggcgtggtggcggacgcctgtagtcccagttactcgggaggctgaggcaggagaatcgcttgaatctgggaggcagaagttgcagtgagctgagatcgtgccacctcactccagcctgggcaatggagtaagactccgtctcaaaacaaacaaacaaacaaacaaacaaacaaacaaacacacaaaaaagaaaacacacagaagaggccaagaggctcagggccttcactctcggaggaaggtttctctctttcaccaccagcctgtatgcattcaaacgtgttctttgcaacgacgacttccgtggctgccctatttaaaatgtccatgatcctcccagtgttcacctcacactgtactatttattttttttgagacggaatttcactcttgttgcccaggctggagtgcaatagtacgatctcggctcactacaatctccacctcctgggctcaagcgattctcctgcctcagcctcccgagtagctgtgactacaggcgtgtgccaccacgcccggctaattttttgtatttttagtaaagacggggtttcaccgtgttagccaggatagtctcatctcctgacctcatgatccaccagcctaggcctccctaagtgctgggattacaggcatgagctaccgcgcccggctaatttttgtatttttaatagagacgggtttcaccatggtggtcaggctcgtttctaactcccgacctcaggtgatccggccgcctcggcctcccaaagtgctggattacaggcgtgagccaccaagtccggcctctcatactgcactattttgcttattaatcttgcttcttgtcctccttccccactagaccgagggctccacggcggctgggacacagtagcagatcaataaatatttgctaagctaattaatggcacttgggaagttttgcagagaaggcggccacggtcgggccccgccttgcctccccaaataggcctcgccgccccaggtcagggatcaaagcggttcccaggcgcgcccttggcccgcgggaaaccactgcccggtcttggtccaggcggcccgtcctacggtccagggttcctatttccgagcctcagggacctcctttccccacggaccccacggccaccgggatcccattctccagttgccccatcgtcaccgcggccgccgccaccgccgccgcagtggcgtccgctctgcgcatgctccggggcgtcaagacgcgaggcgtgcagaaggcgaagcgtgcgcaggcgcggggccatcgcggcccgagtggggcggtgcatcggacgcgcgtgcttcctccgggccacgcccacccccgtccgcccagggacgggcgcgcacgcgcgccgggagcggaagggcgggctggcgcgcgcacgaggccgggcaggcggcggaagctggagaggccgccgcggtgctgagggggaggggagccggcgagcgcgcgcgcagcgggggcgcgggtggcgcgcgtgtgtgtgaagggggggcggtggccgaggcgggcgggcgcgcgcgcgaggcttcccctcgtttggcggcggcggcggcttctttgtttcgtgaagagaagcgagacgcccattctgcccccggccccgcgcggaggggcgggggaggcgccgggaagtcgacggcgccggcggctcctggtaaggaacgcgggccgcgggggcagcgcggcgcggggccggggagggcggtttgaatggagccggggcgccgaggggggagggggctgccggcgcgccctgtgcggggccggggtacggcggcgcccgagggtcaagaagcccagccggcagccgcgcgcgtggggaaggccacagtgtcgcgaggccgtggcagcggcggcccccgcggagcggcggggtgggtggggggcccgggccgcgtggaggccgcgcgatcctctccgcgcgcgctctcgccggggtcgccggacaaagctcgcccccctcgcccggcacccctacagtcgccctcccaattacagcggctgcaacaataggcaggcgttggggcttttctggctgcgtggtaacgggtccgacccgaatgttgcgtttttggcgaagctgcgatcggggctcagccaaacctccagatatgtccggcgtcggccggacacgggcattagcggtccccttgggctagccgacctcaaattgtcttaaaaacgtgtcattccagattttcaaggaaaggtaaaggactcccccgatgccttgcagttagtgacttcaaaatgtttgcccgaattggggttggggatggggtcggcggcaagtaggggagcacggaggaaatcctttgctgtgtaaaagcattgcttttcttttgcatccttttttctccttcccaattggtttttcagattaaggcttttattttcaacgtggaccttttgggcgagtgttttgtcccgatcttgaagataccagtcttgattttttttttttttttttttggtcagtgactccttggggaaagtagcaagggaataagcggaaaagccgcttcgcaggaatttgaagcaagttttcagtttggattgataggctgcattcaagcttgattcctggtgctgtcagtcacttagcacactgtcactttagggaagtggcttaacctctctgaacctcttagttttcctcctttgtgaaagctcctttgtgaaagggggtaatctcccaaatggaattggtgaaagcctgtaaaatggttcctcgcaagcgggaagcactattgtaattgtctggtccaatctccctcattgttcagcagataacttcttgaggccctactaagtgttggatggtcgggggttggatcctggagcctctgcagtcttggaggggagcgggtggtaaatgtgggaacaaactctcttggcctatcgtttattgctctgaacctgcactgtgagagggacacagcggacaggcaggggatcggtggtagccagagatcacgggggctgcttggaagagggggcctcaaaatcagggagggtgtgtaggattgtattttgtttttgaggcagagtcttgcctgtcgcccaggctggagttcagagtcccaatctccgctcactgtaacctccgcctcctgggttcaagcgattctcctgcctcagcctcctgagtagctgggactacaggcgcccgccaccacgcctggctaatttttgtatttttagtagatatggggttttaccatgttggccaggctggtctcaaactcctgacttaaggtgatccacccacctcggcctcccaaagtgctaggactacatgtgtgagccactgcgccaggattgtattttgactttccctggccacctcggactagccattgttcccctcagctacattcatacatcaacttggtcctttccggtgtagctgtcacccccagcaccgtgagagctggggttgtgtctgcctggctggccccacagtaccctgggcctgacacatagtaggtctttagcgaacttatgtggattgaatgagggggtcctgtggaagatcgcgtgaccatctgtgtaaaaggcttggtgcagggccaggtgcagtggctcatacctgaaatcccagcacttggggaggctgaggcgggaaaattgcttgaacccgggagtttgagactaacctgggcaacatagtgagacctcatctctacaaaaaatacaaaaattagccgagtgtggtggcatgcaccggtggtcccaactactcaggaggctgaggtaggaggactgcttgagccagagaggtggaggctgcagtgagccattcttgtgcccctgcattccagcctgtgcaccagagtaagactgtctcaaaaaaaaaaaaaaaaaaaaagaaaaagaaagcttggtgcaggactgggggtggattgtaagggatacaggttagttgtttgaacagtttttgcactttccaagccattgtttcctgaacctcagttgtcctcatctcccctacaaagtgtggggtggtggttagcgtggggtggtggtaaggagtactcattctggaatcagacctcctgaattcacacccagctctctaaatcgtagcttaacctcaagcgaggcgcttagcagtagggccccccacttgtgaaacaggtaggacgaggatgcccgaaacttcacaggcttcttgtgagggttgaatgaggtcacatgggaagccgctaacacactgctgcacctgatgcgtagtgaacacttgattttttttttttttttgagacggagtctcgctctgtcatccgggctggagtgcaatgcccctgtagtcccaagctccttgagaggctggggcaggaggtacaggctgcagtggaccatgattgagccactgcactccagcctgggtgacgaagcgagaccctgtctaaaaaaaggaataaaaattaattcatgcatagttaggaaagtaataaatggttttgcatgggccacctaaaatcattttgtgtccagccctttaggagacgtaaatgttgatcgtgcaggcttttgagcaggggaggtgatgtcatcagaattgtgatatagggcagtgcagtggtctctaaacttcttgtcagtgaggagcattccaacatatgtgtatttatttacaatttatttgtgtacctttgcttctccttgggaaccctcaaaacaccaggagataaccttagaccattccatgttttggctgtttgtgggaggtgggagcatgggagggactagggttttgggcagatgtctggtggaactttctttctttctttcttttttttttgagacggaatcttactcttgttgcccaggctggagtgcaatggcacgatctcgtctcactgcaacctctgcctcccgggttcaagcgattcttctgactcagcctcctgagtagctgggatcacaggtgtgcaccaccacacctggctaagttttgtatttttagtagagatgggatttcatcatgttggccaagctggtcttgaactcctgacctcaactgatccacccaccttggcccttggcctcccaaagtactgggattacaagtatgagccaccgcgcccggcctctttttttttttttcttatgagacagagtcattctgtcgcccaggctggagtgcagtggtgcgatcttgactcactgcaacctccgcctcctggtctcaagcgattctcatgcctcagcctctggagtggatgggactaaggacgtgcaccaccatgcccagctaatttttgtattttagtagagaccgggtttcaccatgttggccagaactcctggtctcgaactcctggcctcctgtaatctgcccacctcggcctcccaaagtgttgggattataggcgtgagccaccgtgcccagccagtctggtggaactttctatcagtaaggaaactgaggcctagggttattttctttccacaagggttgtcaagtcaaccacctgggtttgactcctggttttgtctttccatccctcggtcatcaaggctgccatggcacagaaggacccattcatggtgcctgtagacagaacacaatgtgaatagtgccccctggagttgtgcaagaaatgacccagccactcttccccatttatgtggcgaacaagcatgcattgagcgcctgccatgtgccaggcactgctggggagctggggattccatggggaacaggcagacaagggtcctgttcttagtagctcacaccccactcttgacttgcaaagggggacagtactagtacccagcttgtaggattgctgcaagagctgaacaaccagtgacaaatgcgaagtgcttagaatggtgcctggcacatagtgctaaacagttgttagtgctcatcatttattaggattcctgcaacagcctggtgggatgacacagataatatactttttcctctagtcataagttctgtatgtttcaaagtggtagcaaaggagtcagctcctccattttgtccttaatggctgcacattgtttaacagcagggatgcattctgaggaatgcgttgtgagatgattttgtggttgcgtgaagatgatagagtgtgcttacacacgtctagatggtggagcctagtccacatgtaggctctgtggtatagcctattgttcccaggctatacacctgtacagcatgtcactgtaccgattattgtaggcagttgtgacccgatagtatttgtgtatctaaatatatctaaacagaaaacgtatgggaaaaatacagtattatgatctttaaaaaatttttctaattagacaattcaaggaggaaggtataatcttatgggactattgtatatttggtccatcattgaccaaaatgttatgtggtgaagaaaaccatgctttgaaatttcaccataaggcattggaaaagggagagtgtgtttagtggcatggtttttttttttttttttttttttttttttgaggtgaagtttcgctcttgttgcccaggctggagcacaatgatgcggtcctggctcactgcaacatccgactgcagagttcaagcaattctcctgcctcagcctcccgagtagctgggattacaggtgcccgccaccatgcctggctaattttttgtatatttagtagaaacggggtttcaccatgttgaccaggctggtcttgaacttctgacctcaggtgacccacctgcctcagcctcccaaagtgctgggattacagacgtgagctaccgcgcccggccaggtttttaaaaatatcaaatgttcagccgagtgtggtggctcatgcctgtaattcccacactttgggaggcccagcagggcaaatcacttgatcccaggaatccaagaccagcctgggcagcatggcgaaaccccgtctctacagaaaagttaaaaaattagccaagcatggtgttgcacacctgtagtcccagctacttgggaggttgacgtgggaggatcaagccgaggaggtggaggctgcagtaagctgtgatcgcaccactgcactccaacctgggtgacacaacaagaccctatcttaaaaaagccgggggttgggctgggcgcggtggctcatgcctgtattcctagcactttgggagccgaggcgggcggatcgcctgagctcaggagttcaagaccagcctgggcaacattgtgaaaccccgtctctacgaaaatacaaaagaaattagctgggcatggtggtgtgcgcctgtagtcctagctacttgtgagactgaggcaggagaattgcttgaacccgggaggccaaggttgcagggagccgagatcgtgccgctgcactccagcctgggcgacagagcaagactacgtctctacaaaagaaaaaaaaaaagccgggggttgggaaggataacagctgctggaatactgggggaaggtatgagagggaacaggtcagaatgaagcctgaggctgaatggagcttcaggtgctgccaccctcataggtgtcaaccctaaggagacatagcggactcattagtatgcccagtgatttcttgattgaagttttctgttaactgcatcctaaggacattaatcattaatttttcagggtgtgggattgatgggcatgtgatttgtggcctcaactcttcttcatatatgggaaagggcctggatggaagtgccaggtgtagctgggtttgttgttacagggcagagagaagggacacattgatttccctccaattccctcagggaagggggctttcttgtttttattttattttattttattttattttttgaaatggagtcttgctctctctctgtcgcccaggctggagtgcagtggcacgatctcagctcactgcaagctcccccttccgggttcacgccattctcctgcctcagcctcctgagtagctgggactacaggcgcccgccaccacgcccggctaattttttgtatttttagtagagacggggtttcaccatgttagccaggatggtcttgatctcctgacctcgttatccgtctgcctcagcctcccaaactgctgggattacaggcgtgagccactgcgcccgactggaagggggctttctttagaaaataggtaaatgttagtagggtggaaaccaaccctggcccctttcaaatgtgtggtttttttttttttttttggagacagttgtactcttttctcccaggctggagtgcagcggtgtgatctcggctcactgcaacctctgccttccaggttcaagcaattctcctacctcagcctcctgagtagctgggattacaggcgtgcgccaccatgcccggctaattttgtatttttttttaatttttatttatttatttatttttttgagacggagtcttgcttagttgcccaggctggagtgcaatggcacgatcttggctcactgcaatctccgcctcccgggttcatgccattctcctgcctcagcctcccgagtagctgagactacaggcgcccaccaccatgccctgcgggggtttcaccatgttagccaggatggtcttgatctcctgacctcatgatccgcccgcctcagcctcccaaagtgctgggattacaggcgtgagccactgcgcccggccagtaattttgtatttttagtagagacggggtttctccgtgttggtcaggctggtctcaaacttctgacctcaggtgatccgcctgccttggccttccaaactgctgagattacaggcatgagccaccactcctggcctcaaatgtttttttaagtcccagactggtttccagagctttgcttttggggactctgttacctccctaaaggggcatagcttcatttatgtatgtggacacttgtcactgtgaaccgttttgctctgtgtgcagccagctgtgagtgtgatagagtagcacgggccccgtttttaatagtgatcgactttaaaatggttctttgaggaggtgttttttttttctttccactttttatttttttagagacggagactcgctgtgttacttaggctggtctttaactcctggactcaagtgatcctccagcctccacttcctgactagctgtgattacaggcgtgatccactgtgctagctcttgggagttttttaagttttctctttgccactggcaagtcacgccccagtggctcaggaagcaggtggctgatgtgacagttgctgctcacctgttccagtgggagacttgagggggagggtctgctgtgtgcgacccatcttgctccgaaagtcccagtaaaggggcatagtggatgtctcattgtgcccagggagctgaaactgcccctgtgatgatcaaatgtgattctggcacagcctggactggctgggcacctgaaggccttgcctgcctcctggaggcatctcctgggtgcctgtgggagtggctctttacttgcccttcctcttgactctgcccttcctcgaccttcaaggttctcatcctattccttttgatcctcggcctgaatcagttactcaggccctggagtcaaagagacttgaggcgggattctgttctgcatggcttaacctctttgaactcagaattccgttttcctctcagaatctccctggcctccaccctctacctcaagaaccaggggctgaaccccggccctgcctgtctttgccaagccttgctctagggcttggtcagcctcgaggaaggggggccttgttatgtttatttaaaaatttatgttttaggttttactttcttagaagtggaggtcttgatgttatctcccaggctggtcttgaaccccttggctcaaaggatctgcctacttcagcctcccaaagtgctgggattatgggcgtgagccaccacgcctggcgcctttttatatttctttcttttttttttctttttttgagacagagtttgtctcttgttgcccaggctggagtgcaatggcggggtctcggctcactgaaacctccgcctcctgggttcaagcgattctcctgcctcagcctcccgagtagctgggattacaggcatgcaccaccacacctggctaattttgtatttttagtagagacggggtttctccgtgttggtcaggctggtctcaaactcctgacctcaggtgatccacctgcctcagcctcccgaagtgctgggattacaggcatgagccactgcacctggccccctttttatgtttctaacagcacgtcccagccgagaccctggtgttcacccttgcctcatctcttgccctcacttgcacatccattccatcagcatgtccagagaaattaaagtcattatcagaccgtgccactcccgtgcctggaacattctagcagctccccactgcactggatgctcctggaacccctttactgtggccctcaaggcctgtgacttctcccctatgccccacctgtggccgcacccacttgccctctgaggtatgatatggaatatatttggtctttgcgccacatgtcataggagtgataggtgtgtcttttaaaattcataatgagccccttttgatcacagctgagtttatgcttatgaggtgatttaggatggggctcctagatagcccaggatggggctggttaccagaaagaccaagtgcttagagggtggcatgtacggaggggccattgaagctgtctgtattgcttccatctggttgaccccgagtcgtatccgttataataaaccattaatgggaagtgaagtgcctgccttagttctgggcgctgctttagcaaatcaatcaaatcgaggagggggttgtgggaattcccaatttataggtggctgggcagaagtactggaccctgggatgtgcaaatggcatttgtagtgggagcagtcttatgggacagctctttttcttttagagacagagtgtcactctcacccaggctggagtgcagtgatacagtcatagctcactgcagtgtccagctcctgggctcatgtcatgctcccgagtagctgggactacaggtgtgcaccactgccaggcttagctaatttttaaattttttgtagagacagggtgctatacttcctaggctggtttcaaactcttggcctcaagcagtcctcccactttggcctcccaaagcactgtgcttaggtgagcccactgcatctggccgataaagtccttaacttgtgggagatagagtctgaattgagttaaattgtaggacacccagctggtgtttggagacttggagaattacttggaaaagacccacgcatctggtcacagaattgttctcggttatgagagtatagtagaagaaaactggttttctctgagttggtgtcaaaagtgctgtgtgagagtgtagagaaacggagtgtgggccaggcacggtggctcacgcctgtaatcccagcattttgggaggctgaggcgggtggatcacctgaggtcgggagtttgagaccatcctgaccaacatggagaaacctagtctactaaaaatacaaaattagctgggcgtggtggcgcgtgcctgtaatcccagctacttgagaggctgaggcaggagaatcacttgaacccaggaggcagaggttgcagtgagctgagatcgcaccattgcactctagcctgggcaacaagagtgaaacttcatctcaaagaaaaaaaaaagaaacagagtgtgttttcccaccttccctgctccagccacactggctgacttgctgtgccttggaatatgccaagcacagtccagggcctttgcacttgctgttcctctgtggtagataaataaccacatggtgcccatgtcactacagatctctgctcagacatcttcatcactgaggtgtcccaggctaccatagaaggagtgcttctcatctgttaaccctgcgaaccctgcttgattagatttatagcacttccaccctctatgtgacattgtgtcttttttttttttttttctctttgagacaaggtcttggtctgtcacccagcggggagtacagtggtgcaatcatagctcatggcagtctggaccctcccaccttggcttcccaagtagctgggactacagccgcatgccagctaatttttgtatttttcgtagagacgaggtttcaccgtgttgcccaggctggcctcaaattcctggcctcaagtgatcgacctgcctcaacctcccaaagtgctggaattacaggcgtgagccaccatgcccaccctgaatactttttttttttttttttggaggggggagatggagttttgttcttgtcgcccaggctggagtgcaatggtgcgatcttggctcactccaacctccgcctcccgggttcaagcgatttcaattttcctgcctcagcctcctgagtagctgggattacaggcgtgcaccaccacgcttggctaattttttttttttttttttgagacggagtctcgctctgtcacccaggcttgagtgcagtggcacagtctcagctcactgcaacctccgcctcctgggttcaagcgattctcctgtcccagcccccacaccgagtagctgggattacgggcgcctgccaccatgccggctaatttttgtatttttagtagagatgagttttaaccatgttggccaggctggtctcaaactcctgacctcaagttatccactcgtcttggcctcccaaagtgttggaattacaggcatgagccaccaagcctggtcctaatttttttattattagtagagatggggtttcaccatgttggtcaggctggtctcgaacccctgacctcaggtgatccacctgcctcggcctcccaaagtgttgggattacaggcatgagccaccacgtccggccctgaatacttttttttttttttaatataacacttccactttctatgtgacattgtgtcatgtttggctatttctgtcactctgctgtccactcctccaggtaggaattgtgttgttctctgccagatgcctggtgtttggaaccagcttggtgcattcagcgctgttcgtatttgggggtagtcatcagtaagtcctctgctgtggcggtggggaaggcctgtcacgagtgacactgggcaggtatggattctgcatctccctgcccactcttggcctttgcatgcctctgttgtggggactcctcttgccgtctccacacagtgtcactcctcacgctcagtgttgcgtatatagctgataacacagcagacccggtggtggcgcaggacatccatccagtgggcctcggccagccgaaaagaaagaataggggccgggcacagtggctcacgcctgtaatcccagcactttgggaggccaaagtggacggatcatcggctcaggagtttgagactagcctggccaacatagtgaaaccccatctctacaaaaaatacgaaaattagctgggcatggcggtgtgcgcctgtagttccagctacttgggaggccggggcaggagaattgcttgaacccgggaggccgaggttgcggtgagctgagattgtgccactgcactccagcctgggtgacagagccagagtccatctacaaaaaaaaaaaaaaagaatggggttattgatgttccacagggagcgtgggtcaggatggatttgtgacacttgatgcggttactctgcgtgttatgtttctgctgggtcacattgtcacatggagacatgatcagaagagcttgaaaaacatccatctaattgatagctaggatagcatttgcaggcttgcagtgtagacaccacacgtccctgtggggttagaggacactcccctaaggcagagaaccgtcctggatgcttttaggtcccttgggtaggtgctcttaagcggttttctttttttttttttgagacggagtctcgctgtcacccaggctagagtgcagtgatgcaatcttggctcactgcaagctccgcctaccaggtttacaccattctcctgccttagcctcccgagtagctgggactacaggcccccgccaccacgcccagctaattttttttttttttttttttgagacagagtcttgctctgtcacccaggctggagtgcagtggcatgatcttggctcactgcaagctccgcctcccgggttcacaccattctcctgcctcagcctcccgagtagctgggactacaggcgcctgccaccacgcccggctaattttttgtatttttagtagagacggggtttcaccgtgttagccaggatggtctcgatctcctgaccctcgtgatccacccgccttggcctcccaaagtgctgggattacaggcgtgagccaccgcgcccggcctggaggttttcttatagaccaccgaggggaacattttgttttgtagttcacgcatagtaaacggggctggctctgcggaagccatcctgcccattgctgttgttccgcccaagcctctgccataacctgactcccacgttggtctgctgctgaaatgtgtccgtgaacaaatttccccaagccccaaaaaacacaatagcagatatcctgggaccaaacttaaatataatgctagtttctcatgcaaggtgaaaacaaccaccataattccaacaaacagatttccaagggatccgattgctggttagcaacctgccctgcctggggctggtcaccgcagtgctttaagacaaaagctaggggtggcgtgaaagaagagaccagacctcttctcttcctcaagcagtctccttccacatttgaacgtcaacagatgtttctattttagatgataattttgatgaagttgaaaataatgagaacatggtagttctcacatcctttgatctttctcttttatttccacaaagacacttcctgggcatttcttgtgggtatttatttcatgggtattctgatttaggctttttttttttttcttggaagtttttctttaaaaatctgaatataaaaagtaatagatggctattgtaaaaaataaataaaaagcgccagacatctgtgatatggaaagggtaagttcctcatcacatgccatcagagagagctactggctgtgctgacagcggtttgtgcatgttttctttggggtaatttctatgcatggattaacatgcatatatatatatatatatatatatttttttttttttttttttttttttttttttttttgagacagagtcttgctctattgcctgggctagagagctgtggtgcgatcttggctcaccgcaacctctggctgctgggttcaagtgattctcctgcctctgcctcccaagtagctgtgattacaggtgcccaccaccacgcctagctaacttttgtgtttttgtagagatggggtttcaccacgtttgccaggctggtctcgatctcaggtgatccgctcgcctcagcttccgacagtgctgggattacagctgtgagacaccatgcccagccatatgcatatatagttattcttttttttttttttttttttttgagacagggtctctgtcgctcaggatggagtgcagtggcgtgatcttggctcactgcaacctccgtttcctggttcaagtgattatcgtgcctcagcctcctgagtagctgggactacaggcatgcaccattacccctggctgacttttgtatttttactagagatgggattctgctatgttggccaggctggtcccgaactcttggcctcaggtgatctgccttccttggcctccaaagtgctgggattataggcattaacaccatatccaaccttacttttttttttttttttttgagtgtttctctgttgccaggctggagtgcagtggcgcgatcttggctcactgcaacctccacctcccgggttcaagcgattctcttgcctcagcttcccgaatagctgggactacaggccagctccaccacgcccagctaatttttgtattttagtagagatagggtttcaccatgttggccagggtggtctcaaactcctgaccttgtgatccgcccaccttggcctcgcaaagtgctggaattgtaggcgtgagccaccacgcccagcctctcaattcttttttgatgtgccaagacttctgcagcgtgggttgtgtgggggttctgattgctgggcaattgaggagcttctcaagaaattgaggcaatatggccacaccacttctagaccctttggcccagggaaagggttaacctcctggacttttaactgagtgttttacatcttagcttttagattcttgtgccagagtagtttcacttccggtcattccttctggctgctggcctggattcccaggctctgttttctccttgtggaggccccggcagcacccgatccaagggccgcacacatctggatttggcttccacacgctgtactaactattcttgcccttttggcccctgaatcccctcatcctttgctttttccacctgagtaggtgtggcctcctggtctgcaatggatttcattgctgcgtgaatttcccctgctagtgacttatcattgagggccccattgcaggactctaagcggcaccgtgtaagacaccttagggacgacctttggccaccccaggactttgctgaaaatgccaaatccttcgtttcctgtatagaagggcagggatgattggcgatggggtaagaaggggtagagagagaggtgttccttgtccttagacacctttcctggccgtgctcgtttggccttcccgtgtagacatctcgccggagcaaggtgcacccagccccacaccccatccagcttctacagggctggcctcaccccagcccttcagggagggtgagctggccaggaggaggttgagggctgagaacaacaccatgcttatggctgtgggagcaaggagggataagagatgtttgtgggtcaggcactgtggcttgggctaggtgcggtggctcatgcctgtagtcctagcactttcggaggttgaggtgggcggatcacttgagcccaggtgtttgagaccagcctgggcaacacggcgagacctcatttctataaagaaatacaaaaattagctgggcatagtggcatgagcctgtagtcccagctactcgggaagttgagatgggaggatcacttgagcccagaagttcaaggctgtgagctgtgatggcgccactgcattccagcctgggagacagagcgagaccctgtctcaaaaaaaaaaaaaaaattgggccgggcgtggtgcctctcatctgtaatcctagcactttgggaggccgaggcaggcggattgcctgagctcaggagtttgagaccagcctgggcaacatggcaaaaaccctgtctctactaaaatacaaaaaaattagccaggttcggcagtgtgcgcctgtagtcccagctactcgggaggctgaggcaggagaatcgcttgaacctaggaggcggaggttgcagtgagccaaggtcgcaccactgcgctaagcctgggtgacagagcgagactctgtctccaaaacaaataaataaacaaataacaagaacaaaattcttggcagccggccaaatctgtgtgcattgcttgccagggtgggcgtgtcatggctgacagcaggtcctggatcgcacctaggggtttgctgctctccagccagctgcttctacctgatgcgcgcccaagaggggaagccagtctgttgttcctgagcattgcggggcaggagtgttacctgcggtttgtgctggggggaggctgcgttacggactcgagtttttttttgttttgtttttgttttttttgagatgaactcttgctctgttgcccaggctggagtgcagtggtgtgatctcggctcactgcagcctctgcctctcgggttcaatcaattctcctgccccagcctcccgagtagctggcattacaggcatgcaccaccatacccagctactttttgttttttaagtagatacggggtttcaccaagtcggccaggctggtgttgaacttctcacctcaagtgacccgcccgcctcggcctcccaaagtgctgggattacaggcatgggccaccatgcccagcccatgactcagttttctcatttctgttcagggaaaggagcctctgcttcacattttgatgggagcatctgaggacctcatctgtgtgatgctcctagtgcgatacctttcacgtgctaagcagctgctcagtaaacctggggagagatggggcaccttggtttcaccagctgagcggctggcacttcctgcctgtgagtgatggttcgatgttccagcctgtggaggaggaggtggagccacagggaggttacccgtgaggcaggtggcaccgtggcttcacagtccatgttcagagtgtgggatgcatggcagtgagttccactgtggccttggccttgtgacctgaactcttccacttccctgtcatctgtcagctggccagcaggaccactgtagtccctgtgtggtggtgagggcccagtgcggggagtctcagttgttaccatcaagtaggctgaggcccctacctcctggctagatcttccttccttgccatttctttgtgactgagacatcctcagcagttgtaaatcacagggaggtgaaggcaagccacagtccccgctggatttgcaaatatcccttcccttcctctgtcagcatgaccttacggtagacgaggatttcttaaataggaccccagaaatgttaaacctcaaagaccaaacttgatgaactggccttcattagaattaagagcttctctctctttttttctgtttgttgagatggaggtttactcttattgcccaggctggagtgcaatgatgtaatctcggcttcactgcaacttccacctaccgggttcaagtgattctcctgcctcagcctcctaagtagctgggattataggcatgcacccaccacgcctggctaatttttgtatttttagtagagacgggttttaccattttggtcaggctggtctcgaactcctgacctctgcttgcctcggcctcccaaagtgctgggattacaggtatgagccatcacgcccggccgatactttctactttttaaaagtggataccggccacatatgtggtggctcgtgcctgtaatcccagcacttctggaggctgatgcaggtggatcaggagttcaagaccagcctggccaacatggcgaaaccccgtctctactaaaaatacaaaaaatatatatatatatatattttagccaggtatagtggtgcgtgcctgtaatcccagctactcgggaagctgaggcacgataatcgcttgaacctaggaggcggaggttgcagtgagccgagatcacgccactgcactccagcttgggtgatggagcaagactctgtctctaaataaataaataaatagatagatagatatctcaatagccagtaagcatacagaaaggtgctccgtgccattagttgtgagggacatgcaaatgaagaccataagaagatgcgattggacattggcaacattgttaaaagttgtaaggactgacagcagcaagtgttggggttgatgaagagcacctggaatgctgtccctgtgtgggaggtgggaccgtgtgtgtagatgatacaactattttggaaaactagcaaagctaagtttatgcctccctttataaccaccagtttcattcttggacacccaagaagaaccaatgcatgtgttcaccaaatgactctcatagcagcttgatttgtgctggccagaacctggtagagtacaatgtctatgaaaatgagaatgctcacataaaaagaacggatgactctcccagacatggtgaccctgtgtgattgtcttttttttttttttttgagacagggtctttctctgttgcccacgatcatggctcactgcagccttgacctcctgggctcaaacagttctccctactcagcctcctgagtataagctaatttaaaaaaaaaaacttgtagagacagggtcttgctatgttgcctaggctggtcttgaattcctggactcaagcgatccttctgccttggcctcccaaagtgctgggattataggtatgacccactgcccccaacattatattatttatatgttacatatattatatgttataagtatatattgtatattatataatatatgtattatagacgtgacccaccacacccgtcattttattggaagttcaataacaggtgaaaggaagccacagtgatagtcaaaatagtggtttccctgggagagtggtattgactgggggggcccaagaatgccttctggaacgtcaggagggatgtctgacgcagtgttcttcaagctgttcacctatgatcctgcgatcagggcatgtacaagtcagtgagagtaagcagaatcacacgctgctcccctcagtactgagctgaggacgtggagtcgctccacggctctccactttgtgctgcaagtcggccagtgcttgttcaagtgcaggcaccagcaacctcatcacaggctttggcactgggcgatactgctggggatggctttgcatcactcccgggctgttgggatcccctttactgtcactctgcacgtgtctgagctttcaatccggaaatgaatttgcggatgctggtggcacccgcgttcctgtttcactgcagcctgactctagaggcagcattttcaggaggagaggccattctaacaagcctctgtgaaaccccgtgcttctaaaaagcagacttgccttattcgggcacaaaatggttttttggggcagcatcttcagtgtactctgtttttccgttgacaaagttagcgctgctttgagttggagccgttcctggaggctgtgacggcatcgcatgatttgatggaagggagaggggagaagttctaatgctcagtgtaaagtacgattaggtggcatacgcctgtagtcccagctactcgggaggctgaggcatgagaatcgcttgaaccccggggacggaggttgcagtgagcagagatcatgtcactgcactccagcctgggcgacagagtgagactctgtctcaaaaaaaaaaaaatgtacaatgaggagagctataatttcagtcacttcccagtgtatgctcgttggcttgtccaccttcagagagggaaaagatggtttgccctcaatgacctggatctttttctctttttcctctgagacagcgtctcgcccttttgcccaggctagagtgcagtggtgcggtcatggttcactgcagcctcaacctcctggactcaggtaaccctcccacctcagcctcccaagtagctggggctacaggcatgtgtcaccaagcatggctaatttttgtattttttgtagagatgaggttttgccatgttgcccaggctgatcttgaatttctgggttcaggccatccccctgccttggcctcccaaagtgctgggattacaggcgtgctggattgtattttgctgtcagtttcagtttatttgacttagaataaagaccttcaagtgaggaagaagctataggtccctgaatatcacaggatctatgaagtatgtggcagtcctgctgtcccttttcctacctcattgcaacactctgtggacctgagaagactgtggggacagaaggcccagaggggagcgccaaggagccagtgcctccccctgccctggccgtgcccacgttgctgggcttcccacctatggaggtagctgcaggcgcatcctccctgcagacatacccatggaccagaggcttcaggctccaaaatcagcatcttagtaacataaacgcaaggttcagactgttgtcacatggcagaggccagggcggcatctcataatcagacagatcctgtttctgtagcagaatgtgcgaatatccacacggagcagaatcaggtcagattttgcctccagatgaatttccttgcagtaacacatttaggtttgtttatgtcaggggccatcttttcaggattggctggagtgccagccactggttcctcccctgctgagtttcctggtcctctctcctgctgttagccatgaaagtggaatgaggtcattttgagcctttcatctcttgtctaagaatatatccctatggctgggtgcagtgtctcacacctgtaattccagcactttgggaagtccaggctggaggatcccttgagccaggatcaacaagtgtttgagaccagcctgggcaacatagagagacccctgtctctacaaaaaaattaagaaaaattagccaggcatggtgatgcactcctatggtcccagctactcgggaggctgaggcaggaggacggcttgagcccccgaggtcaaggctgcagtgggctatgatggctccactgcactccagcttgggtgatagagtaagactctgtatacaaaacaaaaacccctacctttcaaattaaaactttttccgctagatcacctaatacaatgtaatttttggccaggaacggtggctcacacctgtaatcccagcacttcgggaggccaaggcgggtggatcacctgaaggtcagacgttcgagaccagcctggccaatgtggtgaaaccccgtctctactaaaaataaaaaaattggcctggcgtggtggttcacacctgtaatcccagcactttgggaggtcgaggcggttgggatcacgaggtcaggagttcaagaccagcctgaataacatggtgaaagcctgtctctattaaaaatacaaaaattagctgggcatggtggtgtgtgcttgtaatcccaactactcaggaggctgaggcaggagaattgcttgaacctgggaggcggaggttgccgtaagccaagatcacgccattgcactccagcctgggcaacaagagtgaaacttcgtctcaaaaacataaataaaacaaaaatagaactttttttttttttttgagacggagtcttgctctgtcgcccaggctggagtgcggtggcacgatctcggctcactgcaagcgccgcctcctgggttcacaccattctcctggctcagcctccccagtagctgggactacaggtgcctgccaccatgcccggctaagctttttttttgtatttttagtagagacagggtttcaccatgttacccaggatggtctcgatctcctgacctcgtgatctgcccgccttggcctcccaaagtgctgggattacaggcgtgagccaccgcgcctggccaaaaaatggaactttttaaatcaagagaattaaaaatgtttctacacttcttacagaatttatccttagaaccagaaatatgccggagagttcaggggcaaagagattcattccaaaaggcagcagaaacaagacagatttgcgacatgcttaaccagagaggggctatcaaaaaacccagggtgtcagagccaggaaatgcagtgtagcttttagaatttgtgttttaaagactattaaatgataagaattgccatgggtaagattatatgaaagcctagaatgtattgagaaatttcactgagtgtgggtgcgtcttcagccagcgagggccttcagccagcgaggcggagaagcctctttacagacacaagtatctttcctttcccatttgtctctgggtggttggaggacatccccttatgcatattagcatctaaaggaaaaggtgacgtttccaagtgtcagggaccaaaaagtgccattatttgtgtaatactttatcctttttaaacttaagttcatttattttaagggaaacttggtcttactactttcaatggaaaaccagcagtatttgccataaatatctgttttggctgaattgatggaatttcggttagaggcttgtttttttttttttttttctgagacagagtgtcgctctattgcccaggcaggagtgcagtggtgcgatccgggctcaccgcgatctccgtctcccaagttcaagcgattctcctgcctcagcctccggagtagctgggaccacaggcgtgtgccaccatgtccagctgattttcgtatttttagtagagatggggttcgccttgttggccagactggtctcgaactcctgacctcaaatgatctgcccgcattggcctcccaaagttctgggattacaggtgtgagccactgcacccggccagtcagaggctatttgagctatagtcctgttctttctgttaggaagataagcaagtggagagcagtgtgaagggtagaccagcaccccctgagacaccctctgccgtgatcaggaatatggcaggagcccctgaaggcccctgtggggcagtgcttgtctgtgagcgtggcccaccccttcctgggtagactgactgatcttgtgtgcctgagatgtaggacttcctctgagagtgatcatggagaaacggtttgggtggctggtggggaaggtactggcttcctgtgggatgtagattctgatgtgaccgtatgattgtcccttgctatccctgtcctgcctcgcccttggtcatgaaccccagactgaccaggactgtcttccagcaggaggccactgtctgcagctcccgtgaagatgtccactccagacccacccctgggcggaactcctcggccaggtccttccccgggccctggcccttcccctggagccatgctgggccctagcccgggtccctcgccgggctccgcccacagcatgatggggcccagcccagggccgccctcagcaggacaccccatccccacccaggggcctggagggtaccctcaggacaacatgcaccagatgcacaaggtagggatccctgtgcccgcctcgcacctgcggcctctgcccactagggctgcaggcagcctctggaccgagggccttacttggaggatggggggaagccttcttgttggaggtgtcctgccttggctcagccccctaccccagggcccacggccatgaacagaaggttcagctcgtcagaccccagcctgtgctggcgcatgatctgggccccgcgggcacctgccccaccgtttcccgctcccttgctttctgcatgtgaaatttgggaatatcactacaaagttttcttttggtaatgaagaaaaacatccaaattcctaaaaaggcttttagccacgtggtttcccccgttctggctgtcaggctcacctgtgcagctcgcagagccgagcagcgggttccctttcctccaaggcgtgcccctcagccactgtctttacctcacctgcgctgagcagggccttcagtcagcaaggtggagaaggctctttatggtcacaagtctcttttgcatgtccctggatgtggttagaggacatattcccttatacatacagcatctgaaaggaaaggtcatattagcatccatgagaaaaggtgacatttctaagtgtcacgggccacaggaggtcccgggtggtagaagatgaggattgcttgaccacagtctcccatatgctcgtgctccactgggcgacatttattttgtgtacctgtctcgaggcctaagtaggtgtcagaaccttgccttggagtcatgctggggactggggagatgcgcgtcatcttcgggtggctgttctcggtgccctcgagcttctctcgggcagcgcatagctgcgctgccacctcacgttccacatgctgaccctgccttgccatggtccctctcgcagcccatggagtccatgcatgagaagggcatgtcggacgacccgcgctacaaccagatgaaaggaatggggatgcggtcagggggccatgctgggatggggcccccgcccagccccatggaccagcactcccaaggtacagaactgcgttccttcctgccttgtgtttgtcatactccagagtcctcagatcattttcctcccctgggttcccacaggatggattcagggagtacctaggatgatgtagccgggtgggtggcccgccacagagagctgtctggcatggcgtggctggtgctctgttctggccacctcgtctcggagcagccctggaaggggaaatgctggttggggggcagaccatgttcagcatgggtgatagaggagggctgtgcagggcagcagccccgtgccacccaggaacttactggaaatacagattcctggggcctgggactctgctttaatgagcccagcaggtgccttttctgtacgaggacaattgagaagtgatatggtgggtgactttccaaggccttgctgtcatcaggggtgggaagctcaggggctgcactgggaatggaagtgttgggggtgggcctggcgagcccgaggatgtggaccccgcctgtggacaggcaggcggaagccgggagagagccgtgatttcatgcacaggttctcagcattaaccagaagcaccttactgagacgtgggccaaaccaaatccaccaggtcggctgctgggctgaggtgccttcagcatgtgccctccaggtgcccctggttgactcaagagaaggatgccatttggctgtgccctgtctcagagtaggagctggtgtagggggaagaggctgtaaaaatcacagacatatgctgccgagtgaccagtgggctgacctttctctgcaggttacccctcgcccctgggtggctctgagcatgcctctagtccagttccagccagtggcccgtcttcggggccccagatgtcttccgggccaggaggtgccccgctggatggtgctgacccccaggccttggggcagcagaaccggggcccaaccccatttaaccagaaccagctgcaccagctcagagctcagatcatggcctacaagatgctggccagggggcagcccctccccgaccacctgcagatggcggtgcagggcaagcggccgatgcccgggatgcagcagcagatgccaacgctacctccaccctcggtgtccgcaacaggacccggccctggccctggccctggccccggcccgggtcccggcccggcacctccaaattacagcaggcctcatggtaagactggctgccctggccctcaggtgtctcagagcgaatggctggggcgtgggtggcggggtggacagaccgtgctctgttgccgactgggttccccggtttgggattgcacgggcccatactgcacttctgggtgctcgggtggtgggggcagctaaatgctgcttccccagctccccgcttcccctggggccgctggttaataggtgtatctgctgtgtcccctggagccagggctgcccacggggctgggcgcaggcataaacctgggacgcactgttttctcttttgtttctccctacatgtaggtatgggagggcccaacatgcctcccccaggaccctcgggcgtgccccccgggatgccaggccagcctcctggagggcctcccaagccctggcctgaaggtgagctccctcttctatggtggtgcacccgtgcccttactccccatctcaagcttgggtccttgagatgagctttgtcagggagaaagggccgagggtggtcaggctgaactgcagcctgtacttttcttgtggtggtccccgggtctcccctgtagccagtcagttcccaaaggctgtcgttcatccctcctctgacagcttgtggccttcacccagtccctgagccctgtatatgtaattgctcagtaagtgctgcaggctcccatctgttgggctcaaagaggcagtgggactcattacccatcctcttggagcctgaggtttagcgatgggcattgaggggcaaattgcttccactggatttagttggcactaggaggagatgacaggaaatgctgccatagagccacagacagaacaaaaaggccttgggagcctggggctggccccagtggagggtgtgaaggacgagggtgaggctgagatctggaggaggttggagcccaaggcaggtgtgaaggacacccctgggtgaaaggtgggagatgggcggggtctgcctgtccccagtgcctcaagcagctcagcagctttccatttccagcccgggatgggccccagagctcaacatgacgccctggccccttgccttctcccaggacccatggcgaatgctgctgcccccacgagcacccctcagaagctgattcccccgcagccaacgggccgcccttcccccgcgccccctgccgtcccacccgccgcctcgcccgtgatgccaccgcagacccagtcccccgggcagccggcccagcccgcgcccatggtgccactgcaccagaagcagagccgcatcacccccatccagaagccgcggggcctcgaccctgtggagatcctgcaggagcgcgagtacaggtgagggcggggcccagttgccaaggtcactgccctgtgtcccccatgtccccctggggaagccactcaactttctcccccactctagcaaacagtgccctgtgcccaccactgccacttggcctacacctccttcctcacctccctgctcccaccctggctgcggtctgtttcccacacagcagtttgagttctctctctttttttttttttgagacggagtttcactcttgttgcccacgctggagtgcaatggcacaatctcggttcactgcaacctgcatctcctggcttcaagcgattcttctgcctcagcctcctgagtagctgggattataggcatgcgccaccacacctggctaattttgtatttattttagtagaggcagggtttctccatgttggtcaggctggtctcgagctcctgacctcagatgctcccaaagtgctgggattacaggcatgagccaccgcacctggcatgaattctctttttatgattgatatcagatctactccgtggattaaaacctgcctgtagcttcaattatctgcccaataagctttgccttatgtccactcctgcccagcatccttcctcacccatcccagtctctctgttcctcttttcatttatttaacaagttagacttgttcctgccccaggacctttgcacaggctgtgcatggctccttctactcattcaggcctgattgctggggttccctcctcatggaggcccttcctgtcacttccagccactctctggaattgcagtggatattttattttttttaaatctcctttatggcctgtgttttctaatgagactgagagttccttgctttgttgttcttgtttagtgctaaggccctgcacttaaaatggtccctggcatacagttggtgctcaatgagtatgtgcagaaagactgattaagagaattagcccacataaccttcgcatgtaaccttcgtaaccttcagaccaagcctctagggtcactccgaggggttgcctcagttttgaggtgagaatgctgaggtgtgcagttgaaatagattcccaccgccctgcgcctcatccatgccagagctgcatgaaaaccttggcccgcctgacgccagaacctggctcacaccactgaaaaggcatgacctgggcgcgtctatcaggaatcttgtttgctgtcccctgaggcccggtcctgaggagtgccccgggctatctccctctctgctgtgccctgcggccagcatcctcttctgaggcatctcttgcctcatgactagtgcctgcctctctcgagggatgggtcccctgcagctccagctgtaactgggtgccctggcaaccctctcaccgcctttgctccttgtctctgctcccaggctgcaggctcgcatcgcacaccgaattcaggaacttgaaaaccttcccgggtccctggccggggatttgcgaaccaaagcgaccattgagctcaaggccctcaggctgctgaacttccagaggcaggtgggtgctggcatggccgcagctttccgaaaagggcctttgtcaccaacactgctgctaaggctccaaatacggcttgcctggctagtattacacctgcctgggctgtgaaaagcagccgtggccatccatgggcactcaatcactgcagagccttcctcttacggcctgcgcagtgctggggacgtggacctcactaccctaaagcacttgccgcctcaaagcagacttgtatgggcttctttcttcctttccctttccctttttttttttttttggaaacagtcttgctctatcacctaggctggagtgcagtggcataaactctgctcactgcaaccaacgcctcctgggatcaagcaattcttctgcttcagcctcccaagtagctgggattacaagcgtgtgccaccatgcctaatttttatatttttagtagagacagggtttcaccatattggccaggctggtctcaaactcttgacctcaaatgatcggcctgccttggcctcccaaagtgctgggattacaggcatgagccaccacgtgctgtcctgcatgggtctatttctgagggtactgtgcttagaccctggagtgcagtggagagatcacagctcactgcaaacttgacctcccaggctcatgtcctcctcccgcttcagcctcctgagtagctgggactataggcgtgcaccattacacctggctatatttttcttttttttgaaacagagtctcactctgtcacccaggctggagtgcagtggtgccatctcaccccactgtggcctctgcctctgtggttcaagtgattttcctgtctcagccactgagtagctgggattacaggtgtgcaccaccatgccgggctgatttttttgaagtgcagtggcacaatcttggctcactgcaacctctgccttccaggttcaagtgattctcccacctcagcctcctgagtagctgggattacaggcatgtgccccacgcctggctaatttttgtatttttagtagagacagtgtttcaccatgttggccaggctggtcttaaactcctgacctcaggtgatcctcctgcctcagcctcccaaagtgctgggattacaggcatgagccaccacgcaggcctggtttttgtatttttaatagacacagggtttcgccatgtcgcccaggctagtctcgaactcctgagctcaagccatccacctgtctcagcctcccaaagtgctgggattacaggcatgagccactgctcctggccgcctagttaatttttcttctagtttttgtagaagtgaggtctctccatgttgcccaggttggtctcaaactcctgggcttgagcaatcctcccaccttggcctcccaaagtgttgggattactggcgttaagccaccacacccagccaagagtgttatacttctgaatgactcctaagacgtgtgtgtggtagaggggaggcaagctggaggtccgagaggaccccctggatagatgtccagaagtgatcaccttctgtcctgtgctcgccctgcccgggggcacctgctagacgtcccctgcacacacggactgggtgtgtaaggcacttacaatgctcctttagcggtgaagcatgtgacatcaccatacgtgtttgtcattgtggatgccacagagctgtgcagtgcgcgggcttgtcctcttccctcctacagctgcgccaggaggtggtggtgtgcatgcggagggacacagcgctggagacagccctcaatgctaaggcctacaagcgcagcaagcgccagtccctgcgcgaggcccgcatcactgagaagctggagaagcagcagaagatcgagcaggagcgcaagcgccggcagaagcaccaggtacgctccggtggccccaaggccctgcagcccgcccacctggctgcctggcttgtccagcggttgccacggggctgtgtttgctttgttcctaaacatgctgcttgtctctctcttttgctcattgtaacagtattctaggtactgagagtgtattggtgtaaaaacccaatggtagggagaagatagtgatgaaatccacgcgtagcacgtctggaaggtgatagggcacaaagaaaaatcaagccaggatagagaggaaggaacgggctgttgtagaactgatgttgggggagttctttcttttggaggtgacatctgggcagacccccaaggaagggaggcacacagatctgtgggaaagagctttctgggaaaaggagaaggtgcaagggccctggggctggaatgtgcctgtgttttctctggaaagcaaggacctgcatgagccagagtagagtgagtggcggggagagctggaggaagggagcgcagggaggtgacgagcaggtgatgcagggccttgcgagctgcatggaggatttgggcttttgctctgagtaaagtgggagccatagagggttctgggcagtgcagggactgatctgactcagggtttcccaagatgaatcagtaagacggaaatcttcaaatctaaaatcaagtaaggatttggggatgattgtgctgatttggtcatttatagattttctagagattttctataattaatatcttattggtgtagtgtaaaataatctagacagtcaacacagcaatctctgttaacttttttttttttttttgagatggagtctcgctgtgtcactgaggctggagtgcagtggtgcaatctcggctcactgcaacctccatctcctgggttcaagcagttttcctgcctcagcctacctagtagctgggattacaggcacctgccaccatgcctggctaactttttttttgtatttttagtagagatggggtttcaccatgttggtcaggctggtttcaaattcctgacctcaagtgatctgtccgtcttggcctctcaaagtgctaagatggcaggcgtaatcccccgtgcctggccaacatttttttttttttttttttttgagatggagtttcactcttgtcacccggactggagtgcaatggcacgatcttggctcactgcaacctctgcctcctgggttcaagggattctcctgcctcagcctcccaagtagttgggattacagatgtgcgccgccacacctgtttgtttttttctttttttgagacagagtttcactcttgttgcccaggccggagtgcagtggtgcgatcttggttcgacacaacctctgcctcctgggttcaagcgattttcctgcctcagcctcccaagtagctgggactacaggcacctgccaccatgcctggctaattttttatatttttagtagagatgaggtttcactatgttggccaggctgctggtctcagactgttgacctcgtgatccgcctgcctcggcttcccaaagtgctgggattacagacgtgagccactgctcctgaccaccaacatttttttatatatattatttcagccttttttcttgtatattaatacaaggttaaatagccctttttaaattttttctaaaactttgctttttttttttttttttttgagtcagaatctcactctgttgcccaggctggagtgcagtggcacgatctccactcactgcagcctctgtcttctgggttcaagcgattctcctgccttagccacctgagcagctggaattacaggtgtgcaccaccacacctggctactttttgtacttttagtagagatggggattcaccctgttggccaggctggtcttgaactcctgacctcaagtgatccgcctgccttggccttccaaagtgctggaattacaggcgtgagccgctgctcctggccacatcgctttgtttttaagtatcatggaaacatgacttttgatgtctacactgtattccatttctatgtgtccaggatctaatcatttatgtcacctttttcctgtttgaggacatgcagcatgtttcagcttttgaaaattaaaaattatgctaggaccggaattcttggcttgaacattttggagctggtctctgatatttccttaaaataaatttgtagtaatggaataagttgggtgaagggttggaagcatttttgagacatttcacatccgtgccatgctgccctgccagtcgactgcactgtgtgcctacctgctgtgtttgagggcctttcccacccacagttgccggtgcttagtttgtttttttttttgagacggagtctcgctctgtcgcccacgctggagtgcagtggcgcgatctcggctcactgcaagctctgcctgctgggttcatgccattcttctgcctcggcctcctgagtagctgggactacaggtgccagccaccacgcccggctaattttttgtatttttagtagagacggggtttcaccatgttagccaggatggtatcgatctgaccttgtgatctgcccacttcggcctcccaaagtgctgggattacaggcgtgagccaccgcgccctgccgccagtgctgagttttatcatcagagagagaaacccaaccgcggcaggcaaagggtgtccctttattgttttcataatagtctcgtttttattttatgtattatatttatttttttgagatggagtctcactctgtcacccaggctggagtacagtggtgcgatctcagctcactgcaacctctgtctcctggattcaagcgattcccctgctttggcctcctgagtagctgggattacaggcatgtgccaccacacctggctaatattttttgtatttgtagtagagatggggtttcactatgttggctgggctggtctcgaactcctgacctcaggcattttgtcctcctcagcctcccaaagcgatattctaggtttttttttttttttttttttttgagacagcgtctcactctgttgcccaggctggagcacagtggcacgatctcggctcactgcaagctccgcctcccgggttcacgccattctcctgcctcagcctcccgagtagctgggactacaggcggcccctcaccacgcccggctgattttttgaattttttttgttagtagagatggggttttaccatggtctcgatctcctgacctcatgatccgcccgcctcagcctcccaaagtgctgggattacaggcatgagccactgtgcccagccctaatttttttatttttatttttagtagagacggggtttcaccgtgttagccaggatgatctcgatctcctgacctcgtgatctgccctcctctgcctcccaaagcgctgggattacaggccaatattctaggttttaaacaagccttgcggggagatgtgtccaccatgctgctgaagggtcagccttctcttttgtgctttcctgcaggaatacctcaatagcattctccagcatgccaaggatttcaaggaatatcacagatccgtcacaggcaaaatccagaagctgaccaaggcagtggccacgtaccatgccaacacggagcgggagcagaagaaagagaacgagcggatcgagaaggagcgcatgcggaggctcatggtatggtcctgccttcttgacgtgcgctcttctacatgtgtagctggtactgcgggctccaggggtcactccccagggttacgccaaggcatttcacagctcggagttagaggtgggacagagggaaaagagcaggcgcgggcttgggagtcagtcctgggctcggatatttgctgatctctctgatcatcagaatgactgtgtgacctcaggccacttagccggctcctctgccttctctggaaaatggaggtggtgcccccttccctcgttctgtgagagccaggtggtgtgatccagacccccgacccctagcataaacatctctgaccatttatttgtgactgagtcgctggttgggcagatattggcagcgtgttctgggccaggtgctgctctgtgtacggggacatggcccctgcctttgtgggggctcctggttgtgcttgaggggcagatacgcgaatgaagcaaacagagtagtggatggtgaccgctacagtgaggagggggaagtggagtggaaggggagggacagggtagtaagtaaaagccttgaaacagaggcccaaagggtggccctgatgcacaaacgcagagacccagggaaggagccccaggcagtgcggacaaaggttgaggtggcaggcagccatgtgccagggcagccggtagccctgggctcccagaacagcgttgtgtggggcaggaggtgaggtcagagcttacaggggcaggtgggaggtgggacctttcagaccattgggaggactctgggttgagttctgatcatgaaggggagcctcacccgggagggttttggctgtggggtgatgtgatctgatgtattcttagaaaggtggggggctgctgtaggaggtggtgggagggatgcaccttggacttggtggagagaaggcttcgggtttggggtgtatttcgtggacagagtgggtaggactggctcatggcctctgtaaatggctgctggcgggactgtctgcctagcgggtgcccttggaacctagcccttggtgggttttgaggaaatgattcctgaatgaggagtcgattgccgtgtgaagggctggtggcacggcacccgcgtgagctacgcgtgccctcagtgcgcttctggattgactggccatgggtgctcacagacatgcacattgtgccaccacattgcagtaacccccatgcttttgtaggctgaagatgaggaggggtaccgcaagctcatcgaccagaagaaggacaagcgcctggcctacctcttgcagcagacagacgagtacgtggctaacctcacggagctggtgcggcagcacaaggctgcccaggtcgccaaggagaaaaagaagaaaaagaaaaagaaggtgtgctgggcctggcatggtgcccgccgcgggtgggatgggagcagccgtcttcacgtgtgtggcctcagccttgtgggtcagggcctgaccgtgtctctctctatttccagaaggcagaaaatgcagaaggacagacgcctgccattgggccggatggcgaggtgaggaagcagggtttcttgtggaagtatcaagctagccctaaggcgttggtctgtttcagactttaaaacctgtgttcttttaaaattacgaacaatgatatgtgatgatggtgagaatcccagggtgtcctctgacgcccatcccacccgaccccacatcccacatgttgtgttttcttccagacctttttctatgcatgtgccacaggattcatctttcaggttttactttgttgtaacgtccgacttacaggagaggtgcaagaaccgtccagagatgtcctgtgtgttcttcacccagagtctccattttcacgttttgtgttttgttttgtttctttgagacagggtctctctgtcacccaggctggattgcagtggcggatggctcactgcagccttgacctcctgggctcaagtgatcctacccttcgagtagctgggattacggttatgccccaccacacccagctaagttgtttttttttttgagatggagttttgctcttttgcccaggctagagtaaagtggtgcaatcttggctcattgcagcctccgccccgcgagttcaatcaattgtcctgcctcagcctcctgagtagctgggattataggcatccaccaccacgcccatttaattttatttttatttatttatttatttattttagacggagtctcgttctgtcacacaggctggagtgcaatggcacaatctctgctcactgcaagctccgcctcctgggttcacgccattctcctgcctcagcctcccgagtagctgggactacaggcacctgctaccacgcccggctaattttttgtgtttttagtagagatgggatttcaccgtgttagccaggatggtttcaatctcctgacctcgtgaacatcggcctcccaaaatgctgggattacaggcttgatccaccatggccagccagtttttgtatttttagtagagacggggtttcaccatgttggccaggctggtcttgaactcctgatctcaagtgatccacccgccttggcctcccaaagtgccaggattacaggcataagccaccacgcctggcctaattttttaaaatttattttctatagagacgggggttccatatgtttttcaggctagtctccaattcctgggctcaggcatcctcctgcctcagcctcccaaagtgttaggattataggcatgagcccccgcacctggccttcacctgtgttttttcctaaactctttgagagtcaaatgcagacgtgacagcgccttacctccatgtaattcattatctacttcataaagacaaggttgtttctgcacactgtaccgaggtgacggacacaggaggtgaacattggtacagcactgttatccaatctataggccttcgtatgaggtttggccagtttttccagttatcttcacagcagcagagaatcctgggtcacatttagtggaggtccctttagtcagctttagtcttaaagagctccttgtgtgtgtgtttgtttttttgcagagatggggtctcatgttgcccaggctggtcttgaactcctgggctcaagtgatcctcccacctcggccttccaaaggctgtgattataggcgtgagccaccacgcttggcttcaggccagctatgtcatccagtggccccggactttggtttgtctgatgttccttgtggttggagttgggttatgtgtctctggcaggcagacccaacatggccctgagtccctctcagggtgtcatatcgagagtgcatggcggaggttagcaaataaggtcactggtgatgctgactttgaacccctgccaagggatctccactgtccagttactgtttttttcttttgtaatcagtaagtaccctgtagggagatacttgagactctgtaactatgttgtaactcctcagaattccagctactccttttagtatctttttttttttttttgcctgtatcagtttttgctctgatggctacaggatggtgacttttatttccatcgttctttctgcattgatttgtttgtttttctatagtaggaaaagctttctctttggtcctgttagtcctgtggccatggtctgccaacccctggtgtagacttacggattcttgtttagttgaatgaatggattccgatcctttaaaatgatttcttttggtcatttagctttagccagcaggagccccttgccattggctcctgtttgcttttggtacatgcccaccattcctggagcacttccttcctcatcagacttttcttctgctttccctgcctgagctctctggagccaactctttctccagggagtcctggttccttttttttttttttttgtctgtcaagacggggtctccctgtgtcacccaggccggagtgtgtggtggtgcaatcatggctccctgtagtctcaacctcctggactgaagcgatcctcccacctcagcctcctgagtacctggggctacaggcgcacgccaccatgcttggttaagtgttctgtatttttttgtagagacagggtttcaccatgttgcccaggctggtctcgaactcctgagctcaagcaatctacctgccttggcctcccaaagtgctaggattacagacatgagccactatgcctggctatatttcgtattattacagaagaatatttacatgccaagatctgactttgggggtgcttcctgctagtgggccatcactgcttctaggccctctgagcagccggatctgggaaatagatgtatgtacacatactcatctgcattgctgtttgtatatattaaaacttgtggctgggcatggtggctcatgcctgtattcccagtactttgggaggccaatatgggaggactacttgagcccaggagttcgagaccagtgtgggcaatatggcaaaaccttgtctttataaaaaattttaaaaattagttgggtgtagtggcatgcacctgtggtcccagctacttgagaggctgaggtgggaggatcacttgagtccaagagtttgaggctatagtgagctgtaatctcaccattgcactccagcctggtcaagacagtgagaccctatctcacacgcaaaaagaatcttgaggttatactgacacctccaattctaatccaacagcacagggttaatttttatcctttccgcctttccataattctaaaatcagcaacctgatttcccttagcaataataggcttacttacctgctccattttagaatacacagaaagtacgttccaaagtgctaatggacacctctatgcagaagtctcctagttagagttcagtatttatagagttcctctacctcaggatatgtgttccaaatactgtgtccagaagttactggggccgggtgcggtggctcatgcctgtaatcccagcactttgggaggccaaggtgggcggatcacctaaggtcaagagttcaagaccagcctgaccaacatagtgaaacctcgtctctgctaaaaatacaaaaaattagccaggtgtgggggcacacgcctgtggtcccagctacttgggaggctgaggcaggagaattggttgaacctgagaggtggaggttgcagtgagccaggttcatggccattgcactccagcctgggtgacagagtgagattctgtctcaaaaaaaaaaaaaaagaagttactttggaccaggtgtggtggctcatgcctataaccccagcagtttgggttgctaaggtgggtggatcgcttgagcccaggagttcgaaaccagcctgagcaacatggtgaaacctcatctctacaaaaaattaaccaggcttggtgcgcacgcctgtagtcccacctactcgagaggctgaggtagggggataacttagcccaggaggtccaggctgcagtgcactgtgtttgtaccactgcattccagcctggggagctttttattacttgagacagggtctctctctgtcagccagttctgtctcacagttctgaagccatctggaggactcaagaaaaaagtaatgggccaggtgcggtggctcacatctgtaatcccagcactttgggaggccgaggcaggcagatcatgaggtcaggagttcgagaccagtctggccagtatggtgaaacccagtctctactaaaaatacaaacattagccaggcgtggtggcaggcttctgtagtcccagctactgggaggctgaggcaggagaatcacttaaacccgggaggcggatcacaccactgcactccagcctgggcgacagagtgagactctgtctcaaaaaaaaaaaaaaaaagtcatgaagtgggaaagtgcatgaagtgggagcttgtgctcagtcctgctgtggctgcctgtcctgtggagtgttgagaacaggcaccggcacttgctgctgcttgtgggttttcttgttctcggacagtggtactcagcctctgttgtgtgttctagtcacctggggagctctctattattattactactattatttgagacagggtctctctgttgtccaggctggagtccagtgatgaggtcatggctcaccgcagccttgacgtcctgggctcaagtgatcctccgaggacctttttctaagtagtagctgagcatgaaggcatgtgcctgttgttgcagctgctcaggaggctgaggtgggaggattgctttagtccaggagttcaagaccaacctgggcaacatagggagactctgtctctccaaaaaataaaataattacctgggcatggtggtgtgcacttgcggtcccagctgattgggagccagaggtaggcggatcacttgagcccagggctttgaggctgtgatcacacctgtgaataaccatggtactgagcccgtctccaaaaaataaaaagtaaattaaaaatcttaaaaagcgaggatgcccaagcctcactccagaggagttcaatcagaattttgggtgtaggggaggcatgcagcaatcggcatctttgactgctcctcccagtgatcccagagaggatgtggagttgaaagtccctgactgaggcagcctgcagagcccattgttggggtaagaggttgctcttatggtggccgctctgtgggtgagcttttagcgcgtagagactgatatccctccgctgtgtggacggtattgacactgtgagcgcagcagttttgcaggtagttataaattcctggaagatgaaaaccaaaatttaaaccaataactttttctccatcctggaagttttttctaggaaatatacaagaattgatgagggagaaaatgtttatccattgaatctcaacaggaggagtttcatatttgttgctaagaggaattatttttgaaatatttcaattagctttttaacaaaaaagaatgaggacccttgatgagatctacaaatagagtataagtgggggaaaaaatcaaggtccaaagaatgtaaattatataaccgttagtgtaaaaaagagggagaaagtggaaacgtctaagtccttgtttcttatccatggaattgatctggaaggatggacaggaaactgataccagtggaaaactgtgaagagaaaaacttaggctggagcacagaagaatggggagagcccacatgatgctcttcagttttcgttaaaaaaataaaaatgggccttgggaggccgaggcgggcagatcacgaggtcaggagatcgagactgtcttggctaacacagtgaaaccccgtctccactaaaaatactaaaaattagctgggcatggtgatgggcacctgtagtcccagctactctggaggctgaggcaggagaatggcatgaacctgggaggtggagcttgcagtgagccgataccgcaccactgcactccagcctgggcaacagagtgagactccatctcaaaaaaataaataaataaaaataaaaaataaaaatgggccgagcatagtggctcacgcctggaatcccagcactttgggaggccaaggcgggtggatcacatgaggccagaagtttgagaccagcccggcctgaattttcagctatgagtgtctggactatttgaaaattacaatgtatatgccagttaccttaaagaaacaggtgttgggagactgaggcagagaattgcttgaacccaggaggcagaggttgtagtgagccgagagccgagatcacgccactgcactctagcctgggtgacagagcgagactccgtctcaaaaaaaaaaaaaaaaaaaaaagaagaaacaagtgtcagccaaggttgatgggttatatatttttactggattactgagtatacagtttacgcattttcccaccactggccatgtttgcctgccattttctgtgcaaacagttgagtgggtgcttcccaccttggcctctgtaagtgtttggtctggaggccctgcaacctcagtgtcacacgaatgactctttttcagcctctggacgagaccagccagatgagcgacctcccggtgaaggtgatccacgtggagagtgggaagatcctcacaggcacagatgcccccaaagccgggcagctggaggcctggctcgagatgaacccggggtgagttgggccttgcattccagatgcagtggggatccaagtcctcggtgggccttgttccagggaggtggcagccaggagcaattttacttctgtttgaattcccggcaggtttggtagggaaagtgaattctgctggctctgagcagatttgtatgaaagcccttacattttttctaggtatgaagtagctccgaggtctgatagtgaagaaagtggctcagaagaagaggaagaggtaagagtgcatttcctggctttcaaggctctcagtgcccactggcagtgacttccaccctgtgtgttgtgaccgtctcctgccctggctgggcatcttgtggggcagggaacagcagggcccaggcctgcccgaagtcggtgctttagagctgtcctatccaatagggcagcttctggcgacatgtgaccatttccattttaaattaaatcagtcacattacataaaatttaagactcattttctctttcacactggctgcatttcaggtgcttggcatcccttatctgggaatggtctgcctcatttgcccattttttttttttttttttgaaacggagtctcactctgtcacccaggctggagtgcactggtgcaatctcagctcattgcaacctccacctcccgggttcaagcaattctcctgcctcagcctcccaagtagctgggactacaggcgcctgccaccacgtccagctagtttttttatgtttagtagagatggagtttcatcatattggccaggctggtctcaaactcccgacctgaagtgatccacctgcctcagcctcccaaagtgctgggattacagacatgaacctccacgtccgacttatgatttttttgttgttgttttgaaatggagacttgctgtgttgcccaggctggagtgcagtggcgcgatgttggctcactgcagcctccacctcccgtgttcaagcgattctcctgcctcagcctccctagtagctgggacttcaggcacctgccaccatgcctggctaatttttgtatttttagtagagacagggttacaccatgttggccagtctggtcttgaactcttgactggtgattttttttttttttgagacagagtctcactctatagcccaggatggagtgcagtggcgcgatctcgctcactgcaacctccgcctcccgggttcaagtgattctcctgcctcagtctcctgagtagctgggattacaggcgcccgccaccatgccagctaatttttaaaatatttttagtagagatggggttccaccatgttggccaggctggtctcgaactgctgaccttaagcgatccacccacctgggcctcccaaagtattgggattacaggcacgaaccagtgcgtcaaagtctgttctgtgttagtcactctaaccctcttatgattattgttcacatggtacatctttttcccttcttttactttcaacctgaatctacaacagcatatgggttttgcattttcagctagtatgacagtgactgctttttgactgagtttttaagaccatttatatttactgtaatttctgatatgattgggcttacatttgctatttcttttctatgcctcctgtttttgttcctcctttactgccttttgtgttcaatgttttttttccctagatttttatttttatagtgccttttttttttttgagacggagtctcgctctgtcacccaggctggagtgcagtggagcaatctcggctcactgcaatctctgcctcccgggttcaagtgattctcctgcctcagcctcccgggactacaggtgcatgccaccaaacccggctaatttttttttgtatttttagtagagacagggtttcaccatgttggtcaggctggtctcgaactcctgacctcaggtgatctgcctgccttggcctcccaaagtgttgggattacaggcgtgagccaccacgcctggcctctcctatttttttgcttacctcttcatgtttagttgaagcgtactttagctaccctggagtctgacttttaaaactctgggaggttgtggtggcgtctagtctgtttagtaatttcctggggctcagtctgtgaaatctggttcctgcatagtgtgtatagcctctgctgtatttcctcaattcttttaaacattttttggttttatcttattcgtgatttttttcctggttcattaggggcaggcagtgtttctttgtcacttagtggtcatccaaagattggccacagtttgtgctcagacacgcgccttctttctcctgctgatggttcagttgtatgaggaggtgcattccacatttgggccattgtcgggttctccctggcacttatgctttgctgagtcctttggcgtctctttgcatatgcacagactcagcctcagccagtgatacgcttttccctaccgtggctgatctcacctccattagcagtgccactggctgtgggcattgcttccttctacaagtgactgagccccttccacctccctgccaagcctcatggcctgcagctctccagctgtaagaggttcatgtgtccagagctgaggcagaagaagtgaaagtggcccacagtaaaagtgctacaaactcccactcttcccacctgaagttcagttttttaaggttcaatgattctagtagacctttggtcaactcgctgagctctgaaatgctcactctgtcaatttgtccggctttatagttgcttttggggaggaaatttgcccacctcctcatttgggtttagccagaagtctcactcctattttaattccagcatgtctgtaccagctctgattttcttgcctaaaatgtcggtgttattaccacctgtttattccaagtgatctgtaaaatcattttttgtgacctaagggaaatcctactggcttttcactggaattatttaacagattaattgcagatcatatttttaaagctttgtagcagttccattatagatgagggaacaatcaactgtgttgtatttgtaggatttaaatggcaatacaagaatagtttaagataaggaaatgcattcttgtctatgttatcaatatgtgttatgcaaaatcgcagtaaaggctggaaagccattaaatgatgcaacatgaatgattaaacaagttcgtagataacttgcagtaaactgagatgcctcttgtcgccagtgttatcagacatattgtagatggttgagacttgtcagtaaagctggaagtaaattacaagcaataaatattgaaagttggttctaagatatttaaagccaggcgcggtgtctcacgcctgtaatcccagcattttgggagggcaagttgggtggatgatccaaggtcaggagttcgagaccagcctggccaacatgatgaaaccccgtctctactaaaaaatacaaaaattagccggggtgatggtgggctctaagatatttaatacctaggaaatccaagagaatcaactgataaactgctttagtaggtcagcagagaatagacgtgtaatgttcattgtataacaggggtaggagagatatggagtctacttctaattagtaatgaaagtccacaataccctgagatagccttaaaagaagcgtcggggccgggtgcagtggctcatacctgtaatcccagcactttgggaggctgaggcaggcagattcttgagctcaggagtttgagaccagcctgggcaacatagtgagtccctgtctctaccaaaaatgcaaaacaattagccaagtgtcatagtgcacgcctgtggtcccagctactcgagaggctgaggtgggaggatcgcttaagtccagtgggtggaggtagcagcgagctgagatagcaccactgccctccagccagagtgacagagcaagaccccatctcaacaataacaaaaaaaaggaagtgtcaggaatctgtggtggggaaaccaaaaacggtttactgggctgggtgcggtggctcacgcctgtaatcccagcactttgggaagccaaggcaggcggatcacgaggtcaggagttcaagaccagcctggccaacatagtgaaaccccgtctctactaaaaatacaaaaattagccaggcatggtggcgcatgcctgtaatcccagctacttgggaggttgaggcaggagaatcgcttgaacctgggagctggaggttgcactgcgccgagatcacgccactgcactccagcttgggcaacagagtgacacttcgtctcaaaaaaaaaaaaaaaaaaaaaaagatgtagccagtgtggtggcatttgcctgtagtcccagctacttgagaggctgaggcgagaggattgcttgagcccaggagtttgagaccagcccggggaatgtcacgagactacatatctacaaaaattcaaaacatttgagctgggtgtggtggtgcatagctgtagttctagctgctggggaggctgaggcaggatgattgcttgagctgaggagttcaaagccatctgggcaacatcctgagactcccatatattaaaaaaaataataataaatacataattttaaaacaaagatgtaaataataaacagcacacattccaggataggtagagggggtgagggctgtaagaagatcacttgcttctgagactgttctccccatgggagtcccgtcccccctctctgggggatgaactgaggtgacatgggcttgtctcttggtaggaggaggaggaagagcagccgcaggcagcacagcctcccaccctgcccgtggaggagaagaagaagattccagatccagacagcgatgacgtctctgaggtggacgcgcggcacatcattgagtaaggggtcccgacacaggttgttctgtgccagcttcctgtgaggtggcgctggtgggagtggctagaatcccagccatccctagctgacattcagcactgtccagccagctgctactgtggaactacagagaccaaatttatttacttcacatttcatgtattttatagggatttaatagagcaattgcattcgcatggttcaccatatgcttacgaggtacagtcaggtgtgcgggagaagccctcctcaccccgttctctgctccccggctccctccctttccactaccctccctggggaaactttccagccttgtgtgtcatcttccagagatgctgtctgcattagcaagcaaaatgtgcatatttttgtcttcatttgcatacatatctccagtgtacattggtgtgcaccttgttattttcactgaaccttccctcttggaggtcatcctgtgtccgtgcagagtgcttccagtctggtcctcagcgtgcagtgtcatactgcgtcacgttatattctcattttcgtagcctgtcctttggtgacaagcgtttaggttatatttgtcatcttttgctcctgtaacacatcacagttaacacagtaatctcttcattgcttatggtaaggaattaatagatcctgttaaaaagcaagtgagggctgggcgtggtggctcaggcctgtaatcccagcactttgggaggccaaggcaggtggatcacttgaggtcaggagttcaagaccagcctggccaacttggtgaaaccgcatctctactaaaaatacaaaaattagctgggcgtggtggcgtgcacctggagtcccagctacttgggaggctgagacaggagaatcgcttgaaatggggaggaggaggctgcagtgagctgagatagcgccactgcactctagcctgggcaacagagggagactccatctcaaaaaaaaaaaaaatgtaggtggataaaagtcacttttttttttttttttttttttttttttttttttgagatagagtcttgctcttcaccaggctggagtacagtggtgcgatcttggctcactgcaacctccacctcctgggttcgagtgattctcttgcctcggcctcctgagtagctggcacaacaggcgcgggccaccacgtccagctaatttttgtgtttttagtagagatggggtttcaccatgttggccaggatggtcttgatctcttgacctcatgatctacccactttgagctcccaaagtgctgggattacaggcgtgagccaccgcacctggccagagttactttttaaaagaaaaacattcagattagattacaaattgcctaagttttaacagctctggttttgtatgaacctgttcagtctgtgtttcttttcacctttaggctcatgaattgttcttagaaagggtgggttctatgatgatcagcatctggctaggtgcagagtgtctttctgtgctgtggcaagtgacagcattctatttgttgttttgagacagtcttgctcagtcgcccaggctggagtgcagtggctcgatctcttgactcactgcagcctctgcctccgggcttaagtgtttcttttacctcagcctcctgagtagctggggttacaggcatgcaccaccacgcccggctaactttttttttttttttttttgagacagagtcttgctctgtcgcccaggctagagtgcagtggcacgatctcggctctctgcaagctccgcctcccaggttcatgccattctcctgcctcagcctcccaagtagctgggactacaggcgcctgccaccacgcccggctaatttttgtatttttagtagagacggggtttcaccatgttggccaggctggtctagaattcctgacctcaggtgatccacatgccttggcctcccaaagtgctgggattacaggtgtaagccactgtgcccagcctaatttttgttttttgtagtagagatggggtttcaccatgttggccaggctggtcttgatctcctggcctcaagtgatccacctgcttcagcctcccaaagtgttgaaattacaggcgtgagccaccacgcccatcagagtgacagaattcttgtactgtggtggtgcaatcaggacccagagctcccaggagtccagtctggacccctcaggcttagtgcgggctgccctgcctggcctcacactgtccggctgcacctctatgtgtcttacagtgctggccacaggtcattcagcagaaagggccactccgcagagcttgtgtcaggagccagcacattgtcacagataggaatgtgtgtccttacccggcacctccatctcactcccaggaatgccaagcaagatgtcgatgatgaatatggcgtgtcccaggcccttgcacgtggcctgcagtcctactatgccgtggcccatgctgtcactgagagagtggacaagcagtcagcgcttatggtcaatggtgtcctcaaacagtaccaggtgaggtagggggtggggaggccaccgccacgtagctgcctcggtgcaggtgttcccaggtggtgcgggcttcagacctcaggcagacctgagttcaccttttgctctttgtgggcaatgcactcttcccctctgagcctcggtttccccatgtgtaaagcagagatgtggtctggtaggttagctgccaggaggacgtgcaacagcagaaagtcagtgtctactgggtgcccgatgtgccaggcagagtgggagcgatttgcactccagtggcctcacagaggagacggggccacctgaggagcagagaggtgcagcacctcctcagcatcgcaccgtgtgtaggactgaaccagggccggagctcagatctgggcatctgcatgctcaggacaggttacctgagctctgtgtggtgtgaaacggcgagcgtcaggagcttagatctaggagccggcagccctggactccgctctttcttctggggatgaggtagcaggtcctgtgtgagggtgaaaagttggtggctctgaagctcttcacctgggcctgacttgggacagtcacgaaacagagctgctcatgctcttaatgcggcctgccatccagagctcattacaaggccccacaagacaaccagtacaactccaaccaaagaacagctctctctggttttcaatttggttgtttcttttcttttcttttttttttttgaaacggagcctctctgttgcccaggctggagtgcaatggcgcgatctcagctcactgcaacctctgcctcccgggttcaagtgattctcctgcctcagactcctgagtagctgggactacaagtgcgtgccatcacgcccggctagtttttgtatttttagtagagacagagtttcaccatgtcggccaagctggtctcaaactcctgacctcaggtgatccgcccaccttggcctcccaaagtgctgggattacagatgtaagccagtgcacccagccccaactttctttaagacaactcttaaaccttttgtgctagtatcaacattcaaagctgcacatgcacctatagtcccagctacttaagaggctgagatgggaggatcgcatgagcccaggagttgaaagtgggcctgggcaacatagtgagacactgcctctacaaaaatattttaaaaattagctgggggtggtagcacacatctgtagtcccagatagttgggcggcttaggtgggaggagagcccgagcccaggacttctgagctgtagcgccctatgtcgatcaggtgtctgtactaagttcagcatgaatatgatgaccttccaggagtggggcaccaccaggtggcctaaggaggagcgaatctgcccaggtcagaaatggagcaggtcaaaactgatgtgctgatccgtagtgagatagtccctgtgaagagccactgcactccagcctgggtggcatagcgagaccccatctctataaaacaataatgaaacaaaggcaaagctcatggttagtggaattttccaagagtcccatgcaattaaaataattagaacttggctaggcgcagtggctcatggctgtgatgccagcactttgggagaccaaggcgggtggatcacctgaggtcaggagtttgagaccaggctggccaacatgatgagaccctgtctctaccgaaaatacaaaaaattagctgggcatggtggtgcatgcctgtaatcccagctacttgggaggctgaggcagaattgcttgaacctgggaggcagaggttgcagtgagccaagatcgggccactgcactccagcttgggtgagagtgagactcggtctcaaaaaaaaaaaaatgaattagaacttggccagaacttacttcctcaatccattacgaacatttccaaattttccttcataacgttatcttcagtttgcaaatagtcttctgtttaaggcctgtatttcagaaagctcccaggctttggaaatccctctcttaatcttgaaatgatgttcaggcagtgaattcctcacgaagtcgccctgaagccctcttggtttcctgagtgcaagtgtcccgtggtgtgggcaggtttttcctgtgtgctgtgtggggcatggacaggcagacaatgtaacaggtgggagtgagctgttgagatgtgtattagaaatgtcacacgtgtccatcgttcgcacagtcatcctgcagcttcacagacgttattgctaaggatgaggctaagcgataaagaatcagtttggttcagaggaaaaatccgtggtaaaggcagtagagggtgggatgtggcttaggcagaactcgtggctggcggtgtcttgactctctgaagtgggaggaccctctggtgtccgacccggccttcagtcctggcgtggccgcatctgtccttgcagatcaaaggtttggagtggctggtgtccctgtacaacaacaacctgaacggcatcctggccgacgagatgggcctggggaagaccatccagaccatcgcgctcatcacgtacctcatggagcacaaacgcatcaatgggcccttcctcatcatcgtgcctctctcgtgagtacccgctgccagcaacatcccacacgccgctcacacgctcctgtgtttgtttcctaagtttgccgcagtagaataccacaaacgaggtggcttaattacagaaatttgttttcctggaggccagaagtccagggtcaaggtgtagcaggttgcttcctcctgaggcctctcttcctgcttgcagggatacgtgcttacatgtatctcactgtgtcttcacatggtccttcctctgtgcgtgtctgtgtcctcatctcttcttcttagaaggacatgggtcaggttggatgagggtgcatcctaatggcctgctttaacttcattgcctctgtattggccctgtctccaggtacagtcgcatcctgagctgctgggggtcaggactgctccaccagcctcggggctgtgcacagctccacccgtcacagcctctgcctctgggtcccggatcaagtgggggcatgactgtgcatcccctccacccctggggaggcctggggtccctctcccgggatgtccttggtgtccttttcaagtcccacaaccagcaaagtccatgcaggggagtcgcaggagacaagaacctcccactagaaaagtagggtgaggccattgaggctccattgaacagtctctacttcctcactgtgcagtgccctgcaagggccaccagagccctcgggcacatcccagcatggcccaggtccttgggcatggtgggatccggacaccctgagaggctctcacttgccactgcctggctccaccggcctttttctccctgcaaacagagtccgcccccctgcccacctctctcgacatctctctacccagctcagcccctgcactaaagggggacctgcctagggttttcccagaaagccccagggccggctcttactggtccagttcaagtcacatgtccagcaagcagacagtcaccggcctgggggttagtctggtctgattgggcaaacttcagcatagcatttggtctggccctagagcacagcccctaactccaaccaggcactcattgggaccactacagccacgagtcagcagcggacccccaactcctggcaggctggggagcggcatgcccatgctccaaccccatgggaaaatgcccttctgcctataagacagccaggccccatgggtcacacacccatagggtaggcctgacgtcctgactgttgcagggaggactggaggaaaggtgaggaccccagaaccctcccaggtttactgtggaactgtttctttcttctatctccctgcttcctacgtggcgggtagaacagactgctctgaaggagcagggcgtccttgtgcacagcgctgcaggtagctgcacctcccctcgtggtcagacccagattgctacagcgttcctgctgcacctgcctgagctctgtcccctgtctgtgtctggaggctgttccttccggctctgcccacctcctggctcccctctgcccttcttcccctggaggctgatgggtgcagtggcagtcgccctctgcagttcccgattttccctcctttcacttacagacttctcagatcaccatctctgctggaacgccgctctccagggtgctgttgttttgcagccttggttcttagttgttaattttttgctttaaaaaatttttttaaacttttcattttgaaatgatctcatttatttttatttttttttattttttgaggagtctcgcactgttgaccagcctggagtgcagtggtgccatcttggttcactgcaacctctgcctcctgggttcaagcgattctcctgcctcagcctcccgagtagctgggattagaggcacgcgccaccatgtccggctaacttttttgcatttttagtagagacagggtttctccatgttggctaggctggtcttgaactcctgaccccatgatctgcccgccttggcctcccaaagtgctgggattacaggagtgagccactgtgcctggcgacctcattcttagaaaacattgtagagttagtgtaaagaattgctatgcacccttcacccatcttccccattctttcataaccccaagacaattatgaaaaccaggaagataacatggacgtaggactaatagcaaaccagaggccttatttaccaatcttgtcagttttctcacaagtggccttgctctggtccaggatcccacactgtcacgtctgtgtggcatgcctgtggcagttcctcatttcgtctttgtcctggtcgagcttgacgctgttgaatcctgatcggacctttggtagactctccttcaatttgggtttgtccgatgtgatcgcgtggagcaacaccacgccctgcttgatgtgccttagcggggaaggcatgagatgttgaggccttggtgtctcgggcaaggtgcctgctgggtttcccactgtaaacctaggagttacactttccgttaataactgtctcgtgggaacgtacttcgacacttgtgaatatctcatttctcttcctactttcctcaataatttcagcatctcttctactccatttcatgttgccataaaggaatacctgagactaggtgataaagaaaagaggtttagctgggcgcggtggctcactcctgtaatcccagcactttgggaggccgaggcaggcggatcacctgaggtcaggagtttgagaccagcctgaccaacatggtgaaaccctgtccctaccaaaaatacaaaaaaaaattagccaggcatggtggcgcatgcctgtaatcccagccactcaggaggctgagacaggagaatcacttgaacctgggagacgggggttgcagtgagccaatatcgtgccattgcattccagcctgggcaacaagaatgaaacgccttctcaaaaaaaaaaagaggtttatttggctcatgattctgctggctggaagactgggcacctggtgagggcttcaggcggattccactcctggtggaaggcaaaggggagccagtgtgtagagatcccatggggagggaggaggcgagggaggcgggggtgccgggctccttttaaccatagctcccacgagagttcagagagcaggaactcattcatcccccatccccagtacagtacaggccgttcacgagggttcacgaggccgttcacgagggaggcccccatgacacagatgcctcccaccaggccccacctccaacattggaaatcagacttcagcatgaggtttggaggtgccagatacccaaactatagcagcaaacgtcagataagtcttgcctgaaaaaataattacatgagagttgccaaatacatggttacctgtttctgtccgctcttctctacaaattaattggaattccaccgttaggaagagctttcccgtctcccccatgtgcttgtttgggtaattattatatcagtgtgggcgtgaacaaatattatttattttgttgcttcagtttttttcagatttggcctgggagaattctccctggaagaattgtgtcttctctatgtattcagtcatttgttaatatgagtatggacccacggatatttatttagtactccaggctacgcaccagtggctgggttttttttgttttgtggctcaaatccatccagctttggccactgggagtgctttcagttggctcttctgtcctttgacacgcccccagcatcgggtgaattttgaggactttcttgctttttggcaccaagagatgctgcaggctcatgtagtctatttcccgcccactccctcaaatcagccatttctccaaggagccctggtttcccttcttacagaatggttttgggaaccaagacctgggtcctggatgggcctgttgcttctggggtgtcattgctcctggggccctctcagtggtcagtgctaggagattcatgtgcgcgtgctgatgctttgtgcacgtatcgtctaaaaggccttctctgcctcggcatctgtttctgtgttaagctgaacgtgagttcataccactgtctgcggctctgagtgaggaccacaggttccttctcacacttccaccctgtgtgtgcgcccattctcagcttccgtggacaacagtttcagagtagtgagccggtacctccgggaagcatcttgagccactagagcgcaggccttggggccagttccttgtgtgttcagacctccagattgcagtcagattccatttccagggtgatagaggtcaccttcttcccctacttcagtgaggttgtgaggtgggtgctcctgcagtctttcccactgcgccccacctgggcaagcgtccatgctgtggaacgccagctcctgcaggccagaagagggcccgcgcgctaggaaatgtttacggcgtatgggcatccggctgtgccggccctctcactgggaattgctgcctcctgccatgagctgcttgtcctgcctccgtttggacctctgtctctgggacctgtcccctcagtcccctcctgacccttgctcctggctcttctccctcccagtgcagatgctccgcacacctccggcttctcccttggtgcgctgactgtccccatcactccagggaggtttcactgttcctgagtcagcggaagcacagggtcaggccctacgggccaggtccggtggctccaagatgccatcagggacccagcctcccccaggtttctgcccagtcattcttgggtgactccaaccctcaggctccttacctcatggttgcaggacggctgcactgcctccctcgcctcatgcaggagagtgggcaggaaagagttctaggagagtgggcagggcaaaaggcagcagaagcgcaaggctgctgagcctctgctccccacgcttcttcaggaactctccccagccttcaccacagccatgcgtccttctgtctattggctgtgccgcctggttggctgtggcttccagcggggctggagatgggttcatggtggacacagcacctccctcgtggagctgcttgggggcaaaccacgagtagtccctgggactccagcttcgagccctgtctttacggaccaccccgtctagactttctgagtggcttccctcccccactgaaaactccctgccccagagttcctcccagagcccgtcccctttgggactcagctttattaccgcctccaccctctcctcagtctctaggctgtcggtctcaggtgactcacccctccccactgcattctgcctgcccccatgtcctccctcattccagccctggtcatcccacaggggaacagccacgagttgccgctccctcccatccctgtcctcccgcctgccacctgagccaggccccgcctcgcccctcactgtcctcgttctctctcacagtcaggaaccttccgtggctggagggtggcagaaagactgtttggtgtctcctatatcctcaggtctccacagcactgttgctagcctggctctgggcgtgaagcctgtgctctgaagctgcattttcccggcagcaggtccaggcttccccagccctggcagcattgtttctgtcccccatcacatctctgtgtccctacttctcactctaaagggccttgccctcttttcccagtggcctcccttctgtcctctgaggcagagcccttcacgtcctcgccagtctctcttcctccctccctccctcagctgccctaaacacagtttctctgcccactcggagggctgtggccatgttggcctcgcccctgacagccagtggctatgggtttgcacagtgagccattgatgagagaccggcacttgactctcatttccttgttccatcagaacgctgtccaactgggcgtacgagtttgacaagtgggccccctccgtggtgaaggtgtcttacaaggtaggtcacagccactgaggtttcctctcttgctacggaggtgcaggcggtggtgggcaggacgtccacacatacctctggacagtgaacctgagaatgctgggtctccagtcgcatggagtctccaggacagcctggaactccagtcacatggatccgggagtttggactgggcagggacagggcagattagctcactggggaggagacaggagtgagcatggtggccagcactcagaggccagctcaggcgcctgagatggggacccaggaagaggggagcctgtcagccaccaggaatgtgcagatggcggtgcaggctgcgtggttccctcaggccccggccgccgctggcctgcactgcttcctcttccccctgcagcgcgtgttctgcgtggtgaggtctggggacgcgccagcggccctgccagcccctttccccactacccctgtgaggacgagccctcccgccgtgtcactgggcagttgcagggggtgcctgtgcccctcttgccacctggccacccggctccaaaagccgagctgtgcatcctgcttcccttgcagggatccccagcagcaagacgggcctttgtcccccagctccggagtgggaagttcaacgtcttgctgacgacgtacgagtacatcatcaaagacaagcacatcctcgccaaggtaacgtgtccctgtgggaaatgccaggccatgggccgagtgctcacacgtgggtcacgctgcccgtctcctccaaagcccctacaagtttcttcccggagtcccacctgcatgtgcgtgaagacagctgccctgtgtaggggaaaggcctaggtgggggcgacctcaggtttacctccctaactgtctccaggcaggccctgagtcaggcccagaagctggggccatctacacagcatgcgctctgcctcctctcgggccttctgcccagagagcctcagcaccaaggcgtctcctgacccgcctacagagtccccatggggccttggccagaccagtcttgtcctcctgtctcattgccttggccgtccctccctggggccctggcttctcaccacaggccatgggctgagattcagcatgtgggggagagctcgagggccaaataccatgactgcctgctggccttgggcagctggttcgggctgttctgtgagggtcctactgtcctggaagcctcttctgggacgaaactgtgaagggagtcccagcgtggccatgactgagaatacggcccagatagaaaacagacatagccctctgcctccaaaaactcatgttcctcatttgaggaggggtaaagatgtacctggtctcacccctaaacatccagctgagtgagtgttgaacagtagagagttttttgcgttttggtttttttttttttgagaccgagtctcgctctgttgcccatgctggagtgcagtgatgtgatcacagctcactgcaggcctgacctcctggcctcaagcgatcctcccacctcaccctcctgagtagctgggactacaggtgtgcgccaccactcccagctaacttttttaaatttattttttatggagatggggtcttgctgtactgcccaggctggtctcaaactcctggcctcaaggaatcctctcgccttggcctcacaaagcactgggcaactgtgtctggcctaacagtagagttcttgacccaggtatggggggatggaggagctgtttatgggtggctccgcctctcagtgcatggctggagtgacagtactggaatactggggctgtgaactgggtgttttcttttctttttctcttcttttttttttttattgagacagagtctcacagctgtcacccaggctggagtgcagtggagcgatctcagctcactgcaacaacctctgcctcctgggttcaagtgattctcctgcctcagccttccgaggactgggtgctttatcccggagccaacaagggaggaaactgaggcccagggagctgggtatcccacgtgcaggctcttacctcaggtccatgcttcaggtgcctcctttgtggctcacccctgctgactccttacaaagccaggccgttggcaggcacaggaaccaggctctgaaaccccgtgctcccctgccagtggctcagttgatgtaatcaccctgcagtgggagtgctctttgagtgcggccactgcgccccctcccgacccgcatggccctgtatgtagtggcgctggcccctaccccatggggcccacattctgaaccacaggctgctcattagaaatgtaccgtcaccaacccagttcccctgagaccctccacaccagcaggacaagtcccccagtcagcaagatgtgtcttctgccagaacgtgctcggcatttttctgtgctgtagattcatatgtgtgattttgcagggaagccagattgcttttttgcaatttgcattgttcacctgccaatagtcatggggtcacgggcctgtctctgcccaaggcttgcaagaggctacgttgtgtggctccaactcggtgagtcagccccggggcaggacgtcaggcctgtgctctccacccagctgcgctcttccacctggagccttcctggctgctgggcgcagagtgggagattctccccatgtgccgggccacctgctgccccctgccctgattgcccactctggggcccgcagatccgttggaagtacatgattgtggacgaaggtcaccgcatgaagaaccaccactgcaagctgacgcaggtgctcaacacgcactatgtggcaccccgccgcctgctgctgacgggcacaccgctgcagaacaagcttcccgagctctgggcgctgctcaacttcctgctgcccaccatcttcaagagctgcagcaccttcgagcagtggtttaacgcaccctttgccatgaccggggaaaaggtgggtttgcccagctgtgcccatgctgacggttccaggtgcggctggctttgctggttggaacgtgttgagcaccagctacagctggctgggcctgtgctgggtgcctggtgagagtctgcatctgcatggagcaggggagccctggaacccaaggctggggcagccacaagggccccaggggagcagggcagaggtcatggtggtgaatctcggaatgctcggggcgtctctgaccctatgctccaggtgcagagtggatggtgaggaagatggccctgaggcagctgtgggaccgcaagcgtgtggagagcacagctagaggctgtagcgtgctgtaggcccctttaggtgccctcagaactcaccctcagggcagtgggaaggaaacttggaagattccagttagcggggccacatggtcaggttctgtcttacgttgttttcaaaaagctcagtggccagtgtgtctcaatgtctgggtggcaccatcagccagactgtggcatggcagcatcatcattgatgagtggtcccacaccagcactgatccctgagcctagagctccttgctgttggaggttgaaactgtgggacagactgtgtttcctgctgaggggtttaagtaaccagatgctgaagtgtgggcagaactacagaggttacctcgaagtgccctgcccagcacggctgggcccacccccttcttcccaccttagacaggtccagggcagctggggccttcctggcctcatgcgtgagttccctgccctctcggctgctggtcaaggcagagactcttctgatggcgaaaccgaggcattccccaaagcctcgtgataaaggagtccccaatttttagactcccgggacccccacactaagggccaggatctgatgctatagttttgtcactttctgagccgagcaaaagctctgccaaaggattgccagggaagcaatagaagaaaagttttggcgtcgtctcattttcctttaacttttttaattaaaacattttaaaagttaattattagtagaggagtaggcgccgtgggaggtcagggtttctttcacctggttccacccaggctgaatgagagtcccttggggctcccggtggcagagccctccctgagaatcacccgctataagccccatgtggtcagcctggcccctgcagcgctcctggcatgagcttggcgtggggtgggtctgtggacactccagtttgtgttactcgtggagaagcagcatgcccgctgccgggggtctttctggtgaggcacagggagcagagtgctctgggtactgcggttccatgtcccaggaattacatggagggaaccagatcctcacagtttcctaaggaagagggtgccctgcctggctcccagaaagcataaagcaggctgaaaagccacgtgccaagggcaagatcaccccaggggaccccgtccaccctgtccccacatccgcaccttctagtgagacctctgtcgccctcctttggaggtaacgcttgcttctcctgtcttgggggcttccaggtggacctgaatgaggaggaaaccattctcatcatccggcgtctccacaaagtgctgcggcccttcttgctccgacgactcaagaaggaagtcgaggcccagttgcccgaaaaggtgatggagttttgaggggagccaccagtgaagcagcctcacgtgggggctttctccagggctgggcgtgctcagggcctctccccacagtcccaggcctgccctggtcaatccagcttgggggtggcgatgacgccactgggtctgtaaagccctgtgctgctgttgtagggattgaaaagcactcataggctcacatagctcacaataggttagagcacaaaatcccacttcctgtcagggggccaggtgcctgtgcgggctctcctggccacatcaggaggggccgtgggcttggggttgccccccggccccccatcatggctctgggttttcaaggcctgctgcagccacacccctgggcccagttcccacagcaagacccatggactcggggtccccggctgcagttgtccctcttggctctttgtttcctggctggctgtagagaggcccccagaagatggctggggggccctttctggcccagtaaccctctggtatctctgcctggtgcttcctctcattgcccaggtctcccctcttctccccagctgtgagggtctcctcacccacaccccagtgtgctctggtcagagctcatatgacagggccgagggggtcagagctgggttcggatggggggagtcaggcctcaagccaccttgggccctcgtgagcattatgtgtcccctgcaggtggagtacgtcatcaagtgcgacatgtctgcgctgcagcgagtgctctaccgccacatgcaggccaagggcgtgctgctgactgatggctccgagaaggacaagaaggtgggccccagagtcccccaactgcattccccactgggtgtccaaggccggcagcgtggcaggcagagcagagcgtgctctgaccatcgggtcatgatctggtcatgatccccagggcatctggccagccctggttatgatggctggtggcttgtgtcaggacacactgactcagctgccagtggcttctcctttgcctatgaaacactggctccttctgcaattggcagcctgggcccagcactaaccccagcagggttagagtgttctagaatgccccccttctctgttattaagtgaaaggaagggagcgggctgtctcctgcaggggctgctctgagaatcccaggccccaggccccacctgcctggctctcctcaccagcagtgaaattatcctcccaggaaatgcaccagaccccttgattctgcccccaaggccttgacctcggcctggcttccccgagacgttgtgtctgtgccccttctcccctgagctgagcagcagtgtgttccctagtccattcccagcccagagcatgcaccccccgccccgcccccacctccttcctcatcctggagcccagggagccctgagtcatggctcacccggctgaggccctcttgcccagctgagaccctctagggacccccacagtaacagtgcccagaacaaagctggcatcacaaagcatcggggactctgcctcagccctttgccagtcttgtttccgtcccgtcctgctggccctgtccctgccatctgccctctgctgtgccaggcagtcatttgtttcccagggcttgttgggggcctccgggcctccagcctgccatctcctcactcccaattgctgtgccaaaagccactcttccccactagagcgtccccatggcccttctcccaacacccacccatccaccaagcccaccccaccccaggagggcaagaccccatttgggtccctctcatctgccttccagggcaaaggcggcaccaagaccctgatgaacaccatcatgcagctgcggaagatctgcaaccacccctacatgttccagcacatcgaggtgagcccgccgcggctgggacggctcaggccctgctgtctgctgagctcctaggcagagctggcttctcctcgacagctctttaaaaacagactcgaatattttcattaggtaatgcctgtacatctgtctctcatttggtcttcgcttcaccagtgcttacgggaagaatcccagcagttagggcgcaacgtgcgataggaatatagggccctgaaagcttgccctcagagagcaggagcgtttggagacttctctggggatgtgtccccccacagtggggtcctgctgcgtctctttggctcactggcttttctcacgttgcggggcgtcaagagtcaccaccgtcttcagtgaagtgtgggggagtcagaaccctttttggtcatggtggctttgagaatctgggttcttagaagcatgcatatgttcgtgtttcttggtgtaaagtgtcagggtcgttggagaccgcctgctgccccgagagcccctggggctgtctcagcaccctgagcgtggctgtggccccatgacgtcctcgtgcattcagggtgtgaagagtgctgtatgggatgtcctttccttcgttggaggagtgtgagggaaaggatgtcagtggactaagaaagatggttttggcatctgtgtctggtctcagagccgccgtgggcccgtgccgagcacacagtgtgggggctttgtcctctgagcacgagcggtgtgtgcggaccgcagcggggcccggtggcctgctcctgcctgtcactgacccctctctccttgccttgcaggagtccttttccgagcacttggggttcactggcggcattgtccaagggtgagaagcttcccaactggatggggtgggcaggtggtccacccagaggttttctgtcgttttgttggctttattgctgctgttatgttgtccaatttcaaaggcagaaaattagaaaatacagaagaatccaaagcaaataatacaaatctttttttttttttttttttgaggtggagttttgctcttgttgcccaggctggagtgcagtgacacaatctcggctcactgcaacctctgcctcctgggttcaaatgattctcctgcctcagcctcccgagtagctgggattaccggcacctgccaccacccagctaattttttgtatttttagtagagatggggtttcaccatgttgaccaggctgatcttgaactcctgacctcaagtgatccacccgccttggcctcccaaagtgctggaattacaggtgtgagccaccgcgcccggccccattatacaaatctttagtgcttggagagctgaccactattaaccccaagagacaggattcctgaggcagacctggcttacagatcccactctgccgcctccaagctctgtgactctagacagctttcttaacctctctgagcctaaactctgctcactagtacagaggcactctttacatcatgtgggtgttttctatagcaccctttgtaaggggcagcccagactcctttaagcccctaatggatgtggatgctgtgtctagattttcaccattgcaaagaaccttgctaaaagcattcttccagctaaagcctccattcaattcccctggggtagtaagccatttgcaagaagagaggcgcctaatgaaaacatcacaaattctttttgatgtgtttttttatactgagttgtggaacagggtcctgtacacctggcttcaaggctgggaggcctggcttggacatgtggtcagccatatcacgtcgtccccctgccagcctcagtgtccacatctacaacacttggggtttggctggagagaacatgagaagccgaggtggcccttccttctgggtctagcagagcatgggtgtctccagtgtggcatttgctcctggggcttctttatcgggcaaggggacaaggtctggcttcccggagcatccctgttccagccccgtgttgtgccggccatgtgactcacagctcctctcattttcatgagtgtctgggtttgacgagaaatacatgtgccaccctggtgatacgcctccccagcgagggtggccgggcttatttcagttgggggaaatggctttgctgaagctttgggtgggtgacgtctgcttaggatgcatgtctgtgcccttgaacccggcgcctggcctggaggcgggcgatgcacctcctgccttacctgcctgcagggttccaggtttaacatcctgcgccttctctcctgcctcctccacactccaggctggacctgtaccgagcctcgggtaaatttgagcttcttgatagaattcttcccaaactccgagcaaccaaccacaaagtgctgctgttctgccaaatgacctccctcatgaccatcatggaagattactttgcgtatcgcggctttaaatacctcaggcttgatggtgagtatgagccagtgaggcgtttcttacagggttttgttgttgtggctgccacagaagctcctcactggcattccctcctgtgaggcagggtgaggcccaggcgctctgggtccagtggccagagtgggcctagccacaggctgagcatcttgggcactcggcactgggacaggccgtggattggacgccgggtgtcctgactcctaggctgacagtctttccacgacaatgctgggcgcactggggaaggggtgccctgtgcacttttagctggaagtgacagaattccataccatgtggacacaggaaagaaagcaccaataggcttacatagctctaaccccaggaggttaaacatccttcaggcacagctggatccaggcatgcaggtgatattggagagacttttctccagctctttgctctgccttcttccatcttggcttcctttccacctgctcagtgtccccaacaaaggcaggtcccaggctggctctcatttagctgctgtgagccgcatgcccatccctgggccattcgtagcagcccagtgactgccaccttgccacaggtcaggcctggacctggaatcagactctgtggtgagcacggagggagggaagcaagcactgccaggcaggagcagcagctgccgtagagaggctctcagcccaaccccctgccctgcggtccctgatgggaaaggtcaccgcctgtgtttctgcgcctgcctgccccagcacacgggagctcagggaggagaggctgtgagatgccgacagggcacgtgagacatgtctgtcagtcccagtgggtcagggagccctggagtgagttcttcgtgggagttactagaactgggcttacgagaaacacgagcatgagctgctgagacagacacggctcagccagtttgttgttccctacacgacctcccagagcctttgttgaagctcctgtgcaaggtctgtctcacagcaggacaccccagacctccataccccttgtcccgttgatcacttggacctgtgtttgctgggccaacctgcccaggtgccacccggagtgtgccctgtgtgtccctccaaactgcaggtcctccccggggttctgtccaggaccactctacagacacgagtctgttgcaggggtctccccggcttgccttcttccttgggggcttcccactttcagctttgaggctgaaaaccaaaatccttcagggtcctcatggccgggccaccccccaccctttcctctcctacggtctctccagcggcttctcccgtcctcgagagggccaaggcttcctgagggccatcccgtctgtgtcgtgtccctgactcccccaggagagagcctggttcccacccatcccagtgcccttctgcctactccataaggacaaggactttggtcagttgaactacagatgtgtcctctgcatgtgatgtggtcatggccacagggccagagaatccattgcgagtagaggaagggtaggagctcagtgaagtctcctgagactgcatctcccatgggtgggctggcatctgggagccgggtggcccctcacctcagcccctcctccgagctggagtagcaggggcacatctggtgcctgagagagggtgggacggcaggtggatggccaggctactgtgggcttctgcaccgtgcctgggcatgtgtaggctggtggcaggaaatggccagtttttatttcttcttttttttgagacggagtttcactcttgttgcccaggctggagtgcagtggcatgatctcagctcactgcaacctccgccgcctggattcaagcgattctcctgcctcatcctccctggtatctgggattacaggcgcccgccactacgcccagctaattttcttgtatttttagtagagacggggtttcaccatgttggccaggctggtctcgaactcctgtcctcaggcgatccacccacctcagcctcccaaagtgttgggattacaggcatgagtcaccgcgcccggcctgccagtttttatttcatcaccaaaatgacttcagtgttcaggggcacctctgtccgaactcccagcagcgcagggagtgttgacattgccttaatgcccacaacgctgagggcatcgtgggttgtcacccaggagacctgctctggctccttgacttgggttttctggggcatggggacactgatcctgccagaaaggacacgagccccctttataaggtctccatgcttttaccgtagaagattctctttgtgaaccacaaaactttttgagacagggctgaaggcaggtgcacccacagtcactgtccacccacccccaggtcccttgtgttgcgagcggcggtgttgccggcattggccgctgtgtcttccgctccccatggaatggcacagggtagagtagaggagagaatccagggctgtggtggtggtggctgtgctgacgctggacgctgtggcctagctgtgggctgggtgctggactctgtgctccaggcccacctcctctagttctcccagcggggcctgttttcatttctgggatgtgtggagagacgttttgtggtgaaacactggaaatccagttattcgccagtggcccacaggcccgtgtggagagtgcggagccagggatctggggatgctggcaggtgctgatcctgctcctgctctcagaagcaggtgttccttggtgtccccactctacccctgaggtcaccccgctgaccctgttctcctctgtgcccgtcaggaaccacgaaggcggaggaccggggcatgctgctgaaaaccttcaacgagcccggctctgagtacttcatcttcctgctcagcacccgggctggggggctcggcctgaacctccagtcggcagacactgtgatcatttttgacagcgactggaatcctcaccaggtaaaagcgggccgggccccaggtcgaggagaaggaagggggtgcctgcaaaacctcgaggagacggccctggcttgagggtcctccagcctcctccacattgtcttggaccccaggagccgggaggagctgcacccatatctccataggtcatcagggagaaaagaggcggggtcctcctgtttcccaaaatacaaacagcctttccctctgattgggaaagcagtgtataagccatccgtcggtttggtttttcttaaatcttggaatggcacccatgaggaggtggaaagtatcctgatcaatctgcgccgtcactgtggggcggcccctgcagtgtgccctgtgagcacacacactggcgcttgttcagacacaattgggggtaaactccatgccacttcgtttacttcctcctcttgttccataaccatgtacccctcatgggcctcggcatcggtggataccaggtcatgctgttacatagctacaagaatttgaaaatgagttaaacttttctctgtgtttcattataagactgataagttcttattgtttttaacatgtaaacaccagtgacagtcaggagtcccttttcccttcctctccaaccgtgctctcttctgagcctctgccagcccatctgccttcgcacatgtatgtactgagattaacacagatgcggcgtggcctagcatgtgcctcttccaccaagcagtgggtgtcaaccgccgagtgcacatcggaagctacccagccatctaatcggccaccaggcgtcccggcagatggccacccctggacgtctgctctcaaactctggttggcaggcatccgtcttttctgttgatcagcctggtcaccaacccagcagggtccctctttctctcagagtgcttgtgcaaacaccctaggtctgcgcagccctcagacatggggtcgctccaccccagacattgtcctcttcgtgttctggttgctactgccaaagtggtttcactcctacgctggggtgtgaatgtaccctgcccttccctgcagcgtgagggcagcagcgttctcagtgtgtaaattgtcgcttgtctgatgggtgaatgccgtggtggtcactggtggccccttttacgatcaggctggggtgtagcttctgcccagaccctggtgaccagccagtttcttaggaggtggttgagttgtgtgtccccgttggcaggccggcagcaggcggaagctgcacctcagggctgggggcgcgttggggagggctggccctgccaggaagtgtgctgacagggcaggagggctgagcggcagacacaaggcactcctggtccccaccagctgtggcctctgccaccccatgggtgccagtcttaagtttcagagcatcactggtactcaccctggtcctgcagctcctgggcccagagacaggatttcgtgttagcctcctcgtactgtgctggggtgatgataaaactaacaacccaggctggacgcagtggctcacacccgaaatcccaacattttgggaggccgaggtgggtggatcaactgaggtcaggagttcgagaccagcctggccaacatggcgaaaccctgtctctactaaaaatacaaaaattagccaggcatggtggtgcatgcctgtagccccagctactcaggaagctgaggcagaaaaatcgcttgaacttcgggaggcagaggttgcagtgagctgagatcgcaccactgcactccagcctgggcgacagagcgagactttgtctcaaaaaaaaaaaaaaagaaaaaaagcccatccacggcacctgcattgttgggagctaactgcaccagtcactgggccacactcctggtgcttattcactcattcgaggtatgcagtagccacgggttgggccccatgtaggctgagggagttttgaggctcacagaggtgagacctggttccggttctgtgtgcactgtgagagtggcagggcccacagccaaaccaagcactgccacaacacggccgagcttcggccccctgttgtaaatggtgctcgactgtgtaggtccacgctgtggggagctgtgccgctgccacgggagctgcttgagaatataatcccctggggggttggtgctttcttcccgaatatctgtggggtcccaataaggtagaaggtggcacttctggaggaacgtgatgagagtccccttcccccgagggacacatggcggcccaggctccaccagctctgttttcatgcggcggcaggtcaggctgggcagaattgtcaggccgagggtggcacgcacagcacacctctccagctagtgtcagaggccaccttcccttttatgacctcctgggctcctttgggactgactggcacctcttcccccaggacctgcaagcgcaggaccgagcccaccgcatcgggcagcagaacgaggtgcgtgtgctccgcctctgcaccgtcaacagcgtggaggagaagatcctagctgcagccaagtacaagctcaacgtggaccagaaggtgatccaggccggcatgttcgaccagaagtcctccagccatgagcggcgcgccttcctgcaggccatcctggagcacgaggagcaggatgaggtgagcccagcaccggccccgacccctccccagcgtgaatggtggacgcgtgagcggctttcatttttgtttttttaccttttttgcactcttattttttttgcatccctttggagtaaagggagtgtgggctgaacggaaagaggatgagtacttgctttttctttgaagtggtttttttttctaaactgctggtgaaagacgccggattgacagccctggagactgaagtcctctatttatccacagagcagacactgcagcacgggcagcggcagtgccagcttcgcccacactgcccctccgccagcgggcgtcaaccccgacttggaggagccacctctaaaggtgagaggggtagttcagtctccatgcccattcaatcctcggcttctcggctgagacggccagcaagggccctggtcccacggagcgtgcgtgtgcgtgtgcgtgtgtgtgcctttcgctgccgtgtgggtccccatccaccgcagccgtgccgggaccaccagctcattcccacggacgccgccgctcgcctctgagctcggccgccgcccaccccggcccctcctcagcggcactgacagtttgcaatcttataggaggaagacgaggtgcccgacgacgagaccgtcaaccagatgatcgcccggcacgaggaggagtttgatctgttcatggtaagcgctgcaggctggatggggcagttcaggcatcccactctgctgccaccaggagcaaagcagacgtcctagtgcccatggtggtatccctagcaggtcagggagccagggacagctcacagtgcagcccactcccacctccagactgacccgtcttccacccccagtctcctgaggatggcatcggagggcgagatgcacacccagccttctgcatgtgacccgagacctgccccaccagctctgttttctaacgggctctccagggcttcatgcactccctttcagagggagttcgccctatccaaggccaagggactgaccaggccttcagtcgcagagcccccttgcccctgggtgggaaacaggaaataagccacccaagcaggggccccttggcccgcaggcctcatgcctccaccaacgctgggccacgcagctgctgcccccctgctggggtctgcagccctcttgtgcaaccttccatcttttcgagtttcctctgcctcctgaggcagagcctctagtcagggtctgacggagccaggccaggtcagccactgaaaaatcgagagctactgtttaactctcgcagcagcgtggagccccacgggcagagaaaggcccttctgaactctcggtgttctggctctagcgtgcccctggtgcctgcatgctgatgcctctcccgttgcctccctgcccaccagcgcatggacctggaccgcaggcgcgaggaggcccgcaaccccaagcggaagccgcgcctcatggaggaggacgagctcccctcgtggatcatcaaggacgacgcggaggtggagcggctgacctgtgaggaggaggaggagaagatgttcggccgtggctcccgccaccgcaaggaggtggactacagcgactcactgacggagaagcagtggctcaaggtacatgctggagaggcccagcagctgccgcaggccagcgccaggcagggctggggagacaaagggcccaccgccaggactcaggcctgggtccaaaatgctttccttgggccactcctggccaggctccgcaggcagccgagagccttccgatgtgggccagggatggtcaggtccttttggctctgccttggaatgcaagaaggacccacggttcctgagcagctcaaaacctgctgctggttatggttggtctttcaagtaaaagggtttacctcttcccgaggttaaaaatcatgttgctgatctcagtggactgctggctttcccagtacctgccaggagggaggcacaagggtgaatcatggactattgaggcgccctgcaaagcgttgcactgctggctgcaggcagcctcactttgggcaagtccccccccatgagctggggagactcagtcatggggagggaggagagggcaagcccccaagggcctctgaacctggcaggtgctgcacggggctggcagttgcttgtggagctgacgtgagggcccgttctcagcagatggcagctggccctgcaacagcagctgcagatgtctttgagtcagtcgtgcggtgctcctggggcttcacccgacccaactttcccagcccaaggcacactgtgacagatgcctggcactgatgtcctcactggggttacggtgacagatcagaccccttcccagctcaggggctctgagttatagagacgatgattcagaatccatccctgaagttgtgtcataaaaatgtcctgaagcaataattccgagaaggcaggtggcagcttttggctatgccatgcaaagtgccacacccaggaaagagccatgtggcctagcccatgtggccaaacagccccggttccctcctgggacctcagcagcccagactcatgagcttgcctgccaagctgtgcaccagagggcgctgttgaaacacaccaggagcccaggtgacagacaggccatcctgttccccagccagcctcccaagcacagcgctccaggacccagaagagaaaccctgaaaagacagtgtgagccctgccacagacctgtgtgacagcagagctgtttggctgctgtatgagtgtcaccggccctgcatttttttcttttttaataaagacaaagtcttgctgtgttacccaggctggcctccagttcctgggggctcaagtgatcctcacacctcagcctcctgagtagttcagactacaggtacacaccaacacgcctggctaattttaaattttttgtaaagtgggggtctcactgtgtcactcaggctggtctcaaactcctgggctcaaacaatccacccgcctcggcctgcagagtagctgggattacgagcatgagccacggtgcccagctcagccctgcatatttgaggcagtgagtaccttttaaatttaagatcagttcatacgtggctgctctatgtacatttttttctaggtgtaatttacataccatacagttcacccttttggggtatatgatacaatcatcttcagtgtatccaagagttgtgcatctctcaccacagtccattttagaacattctcatcgcccccaaaagaagccctgccccgatttgccattcctggtaattcatggattctccccagccccaggcaaccactgatgtactttctgtccatatagttttacctgttctgggcgtttcctgtcagtggagtcctacagcgtgggatgctttggtgtcaggcttttttcacgcaatgtaacatgctgacccatgatgcagcaggtgtgttgcattctttgatggtgaaataatcctgcctcgtacagatttgtcacattcggtttttctgtccattcttgatggacacttgggttgtatccactttcgggctattacaaacaatactaccgtgaacattcacgtacacgtttttgcgtgcacgcgtttctctttaatatgtgatttctctttaatatctgatttctctttaatatgtgcctaggcgtagagttgccggaacaatgttagttctctatttaaccttttgagggaccccagcctggtttccttggtggctacgccagttcacagttccaccagctgtgtatgagaattcctctttctctacatcctcagcaacccttgctgttccctcgcccgctgattctagccatcccagcacgtatgaagtgccatctgagtgtggttggatttgcatttccctgatggctaatggtgtggagtatctgttcatatgcttcttggccctttgtgtatcctctagaaagagatgtctagtcacatcatcctttacccaaatttaaaatatatttatcttaatattgaattgtaagttatttacaagtgccttatcagatatcatttgtaaatattttgttccattctgcacattctcttttcgcttccgtgatatccgttgaagcacagaagtgtttcattgtacttacagtcgatttttctttttcacctgtgccttggtgttgtatctgagaaaccatcgcctatccaaggtcacgaagacttgcccctgtcttttctcctaggagggttataatttgatctcttccatgtagatccatgtaagatccattttgagttaaattttatacatgatgtgaggtaggggtccatcttcatccatccaactggaaatccagttgtcccagcagcatttgttgaagagactattttttcccattgagcccatcttattacacagtatattcaaattcacagttgtgaaaaatattatacaaaacactgtctccccactactgttggctgtggaattggcaccacttttctggcagccatctgttgccaagtgaactcaaagccttcaaaatgctcctatggccgccatcggacatggccatgactgtggcagcctaaagcaacagaactattttctctgcattctgggccagaagtctgaacccacggtgtgggcagggctgtgttcctttcgaggccctaggagaggacccttccttggcttttccagcttctgatggttccagaagcctcctggcttggggcagcgtcaccccatctctgcctctgtcttcatggggacttctcctctgtgtccccttctgtgtcttttaagaacaatttttaaaacttaatcccaaaagtaaagacctcatttgcaaagaaggtcccattccgaggttccaggtagacatgagtctggggggcacccgccgctccgccctgggtctgcagggggccttctcctggtgcctcctgcctgctgtgccctccatgctgcttctttgacccggttgccttccatcctcctgggcccctcaggctctcagcttcccatcttctctaagacatgtctgctccatcattctggtgtctctctcttccctccttcctggcacctgacacgtttgttaccccacttgtggggtgttgctgtctgatcaccatcttccttccaagggtaggggaaagggccctggctggttcaagtcacagctctgtcctcagcgccaggcacagtgcccagctcactggcacagcctcagattccctggacacctggctccccggctgcattttttaccattgggataagttattagtaccattgaaaattaatacctggggattctcttaatattgttcatattcatgttcttctcagcagttttaccatgaggaatctgtcttaaacaatgtcagttgtcaatagcgttatttaaaatagcaacaacaataaaaaaaggtggtcagacctggcagcttgtgcctgtaatcccagcacttggagaagccaaagcggggggatcatttcagctcaggagtttgagaccagtctggccaaaatagcaagacctttgtctctattaaaaaaaaaaatgccaggcacagtgacacatgcctgtaatcccaagcactttgggaggccgaggtgggcagatcacctgaggtcaggagctcaagaccagcctggccaacatggcaaaaacccgtttctactaaaaatacaaaaattagccaggcatggtggtgggcacctgtcatcccagctacttgggaggctgagtcaggagaatcactggaacctaggagttggagtttgtagtgagccaagatcgcaccactgcactccagcctgggcgacagaatgagaccctgtctctgaaaaaaagggaaatgacctaaatgcccaagaacaaggggaggctaaattagggcacgttgtgcactgaaacactaaacagacattaaaaaattttgttgtagaaaattacaggaaaagatatccatgacacagccagcagtgtggcacgtgggctacaattccagcgtggccttcagttctgcacacgtgcgtcaaaggtggggagagttctggtggtgggtggcgctgagggctgcacaacactggggacgtgcctaatgcccctgaactgtgtactaaaacatggctgctttggtaaattttatgttatatatgatttataatatatttttttaaatgcccagctactcaggaggctaagatgggaagatcacttgagcccaggagttaaagtccaaccagggcaatgtagcaagaccacatgtctaagaaaatttaaaaatcggctgggcgcggtggctcacgcctgtaatcccagcactttgagaggccgacatgggtggatcacgaggttaagagattaagaccatcctggccaacatggtaaaaccctgtctctactaaaaataccaaaattagctggacgtggtggtgggcgcctgtagtcccagctactcaggagggtgagggaggagaatcgcttgaaccaggaaggtggaggttgcagtgagctgagattgcaccactgcactccagcctggtgacagagcgagactgcgtctcaacaacaacaaaaaagaaaatttaaaaataatttttcatacaaaaattagccaggtgtggtggcacgtacctgtaatcccaggtacttgggaggctgaagcaggagaattgcttgaacccaggaggcggaggttgcagtgagccgagattgcaccactgcactccaacctcggtgacaagagcgaaactccgtctcaaaaatataaaaataatttttaaaatgtcttaaaaaggccgggtgtggtggctcacacctgtaatcccagcactttgggaggccgaggcgggcagatcacaaggtcaagagtttgagaccatcctgaccaacatggtgaaaccctgtctctactaaaaatacaaaaattagctaggcgtggtggtttgcgcctgtaatcccagctactcaggaggctgaggcaggagagttgcttgaacccaggaggcggaggttgcagtgagccaagatcatgccactgcactccagcctggtgacagagtgagactccgtctccaaaaaaaaaaaaaaaaaaatcttaaaaagaagaaatagatggaggccaggcccagtggcttatatctgtaatcctagcactttgggaggctaagatgggagcactgcttgagaccaggagttcaagaccagcctgggcaatattatgagaccccgtatctacaaaaaatttttttaattagctgagtgtggtgacacgtgcctgtagtcccagctacttaggaggctgaggtgggaggatctcttgagccctgggagttcaagactgcagtgagctatgatggtgccactgcactccagcctgggcaacaggtcgagaccctgtctctaaaaataaataagtaaataaaagaaatagatggggagagtgtggaacagaggtgtcaacatcacctccgggtgaagggatttcaggagcacgttcttttctgtacagagaagatagttctttttttttggtcaagaaattcaaccattagttttttaaagacaagcttgggtggggtgcctgctgggggcagtgctggtctttcactgcagcccaggcaccccttgagagtcccagtgtgtgttatgccccgagccagtcaagctgaagggagagcgggtgcgggggccctcctccgtgtcccagcccggcccctgggattgcgtcgcggcctctgcttgtcgacctgggtgctggctgtcctattttactactattgaccctgaaggccatcgaggagggcacgctggaggagatcgaagaggaggtccggcagaagaaatcatcacggaagcgcaagcgagacagcgacgccggctcctccaccccgaccaccagcacccgcagccgcgacaaggacgacgagagcaagaagcagaagaagcgcgggcggccgcctgccgagaaactctcccctaacccacccaacctcaccaagaagatgaagaagattgtggatgccgtgatcaagtacaaggacaggtaagcgaggaggcggggagggcgggggctgtaggggtccccgtgggagcaggcctggcatctgcactctgactctgcacactcaggcttgggccgctcactctttcactcatccacaaacactgactgaatctctgtgtctttgagcctggccctgaggaacatgctttctggaacagggaagcacacatgtatctgcggtgatgagagggaatgtcacatgtggtcgagaggagaggcaggggtgcgggtctcggagaaggggacattgcagcagagccttgagagaggggaggttggggagagtgcaccagcagaggccacagcaggcggagaggctctgccaaagttgtggcctggtggcctcaagggatgaggtgggatgaggggttatatggcagtaatgggtgctgcccgtgtggccaggaggttggggacaagaggctggcatgtctggagcagagaaagtggcagccctctcctgtccttgcaccctcccaggctacctgtgccatctctgtgttggtgagatggtggccacactcctgctctctgccaggccctgctccaagcctggagatcgctgtcctcacagacatgtcctatatacgaggcagcatgcggttccagctgtggccacggcccagcggcggatcataacgtgttggtggatcatgagtgccatttatatgtttttcatttactaatatccttttccgtgagcgactctatatgggtaccatttaaataagaagaaaggaatgttctcagcaactccccagggaggcatgtgcaccttctgccagcccagggcaggtcacagagctgggcaggagccagcaaaggtgtaaggcccatgcctggcccaggactcacccagtcttccactctccaaggtcttatttcacttcctggtacacactggccagtacggctgtccccgtaatgggagggttgtactgtttgattttaaataacagtttgctgttagtcatgaagcagagcgtgggggaattgtatctgttggaggggaaagtgaagggagcccacatgcatggtttggagagaatcttaccaagtgtgaagttttagaggatggtaacaattggagtgcctaaattaatgagtcaaaattaccgcgcaaggccagctgtggtggtccacacctgtcagcccagcactttgagaggctgaggtgggaggatcacttgaggtcaggagtttgagaccagcatggacaacatggtgaaaacccatctttactgaaaataggaaaacaattacctgggcgtggtggcacgctttttgggaggctgagacaggagaatcacttgaacccaggaagtggaggttgctgtggaccaagattgcaccactgcactccagccttgggtgacagagcaagacgcccactccaaaaacaaaatactgcttaaaaaggttcttttagccagatgcggtggctcatgcctgtaatcccagcactttaggaggccaaggcgggcggatcacttgaggtcaggagtttgaaaccagcatggccaatatggcgaaaccccctctctactaaaactacaaaaattcgccgagcgtagtggtgcatgcctgtaatcccagctactcgggaggctgaggtaggagaatcttgaagctgggaggcggaggttgcagtgacccaagatcacatcagtgcactccagcctgggggacagagtgagactccgtctcaaaaagagaaaaaaagaaaggttcttttattattggaagagaaacagatgatgaaggaaaggagacatattcaagttcaatgccagatctgaaaatgtcatgtgttgtcagtattgagaaaaaaatatatagactctaattcacaaacctaactccaaggctaagtcctcaaagaggaaagcaagtggaggacttaagttacttaaagtgcgggatacagctgcgggcagtagcacatgcctggggtccccactacttgggaggctgaggtgggaggatcacttgagcacagcaggtccaggctacagtgagccatgatcacacagctgcactccatcctgggtgatggaatgagaccctgtatcttaaaaaaatgaaataaatacagaatacttatttaaaacatgggccaggtatagtggctcgtgtaatcccagcactttgggaggctgaggtgggcggatcacttgaagttaggagtttgagaccagtctggccaacatggcaaaaccccatctctacaaaaaatacaaaaatagaaattaaactggcatggtgatgcgtgcttgagctcccagctcgggaggctgggcacgagaatcgcttgaacccagaaggcagagggtgcagtgagccaagattgcaccactgcactccagcctgggtgacagagtgagacaatacctgaaaaacaaaaaacaaaaacaaaaaaagggaattcgcagaaatctaatgacaatgacagaccctccccatgttttatttctaatgataatcttgtgagggaaacttaacattaccaacctaaagaagacccttgaagcgcagtggggaaagcacgggtgtctccatcacactggtctcctgggtatccacgtagagaggatgagcctcgaccacccccacacacgcacacaccatgcacttggatccacgtgacatggactgtggatgtaagaacgtgaaaggtaaaacaaaattctagaagaaagcacgggagaaaatcttcatgagtaggcatcgatttcttccacgggagccaaaagccactaatcacaaacaattgagaaattagacctcactgaaattaataacatctgtttattaatggacacgctgatggagacagtgaaaactcctcatagatgaggaaaagacaacacaatttaaagctggacaagagccgggaacagacgcctccttacacaggacatcccaggactaatcaatgtggggaaaggtgctcacgtcattgcattagcatcacaacttcaagaaaatgctcgttaaaaccagagtgacttgcaccagcacccgccccagaacggccgaatgcccatcagtgctggcaagtctgaagcagtctggcctcacaccctgcgtgtaggagtatgcagctctttggcaatctcttctgttttgctttgtttgtttttaaccatcgaactgcagaagataatattttctgaggctcagcctgtacataccctctgacccagcagcctgcagccctcgttctacccaggagagctgagtgcatctgtccacaccgacagacgtgtccatagccactttggtcataatctcccaaaacaagaatcagcccagtgtccatctacaggggcatggatcagtggaggcctaatcgtacagggccccaaacagctgtgaaaacagacatagtactgctacctggaagaagcttacattttgttgagtgaaagaagccagacactaaaaagggcatactggccgggcacggtggctcacgcctgtaatcccagcactttgggaggccgaggcgggcggatcacgaggtcaggagattgagaccatcctggctaacatggtgaaacaccgtctctactaaaaatacaaaaaattagccgggtgtggtggtgggcgcctgtagtcccagctactcgggaggctgaggcgggagaatggcatgaacccaggaggcggagcttgcagtgagccgagaccgcgccacggcactccagcctgggcgacagagcgggactccgtctaaaaaaaaaaagagggcctactgtgtgcctccagttctgtgagggtcagaagctgatccacagtaatggctgccaagcagtgcttaccttgagagagggaatagcaggaaagccacacgacgagccttctaggatactggggatattctctctatagatctggatgtgtatatgatgtgtacattcaccaaggtgtacacatgagatatgtacacttctctgtattccattacaccttggtttttgaaaagacagaaacagcatgctcagcttattaagaacctgaatattttcagacaaaaagtatgtctagtgttagtccacttttttttttttttagttttagactcacagagccctcttagggtcatatttagttgtatatcatctgacaaaagagggaatggctcacccagctgctacagtcagtcttgtagcctttgtaagatttgatgataaatcatacaataaattaaaactttcggctgggcacagtggctcacgcccataatcccagcactttgggaggccgaggcggaggatcacttgagcccaggagttcagatgagcctggccaacatagtgagactctgtctctatttaaaaaaaagaagaaaaaaaaagtctgggtgtggtggctcacgcctgtaatcccagcactttgggaggctgaggcgagcggatcacaaggccaggagatcaagaccatgctggctaacacagtgaaaccccgtctctactaaaaatacaaaaaattagccaggcgtggtggcgggcgcctgtagtcccagatactcgagaggctgaggcaggagaatggcgtgaacccgggaggcagagcttgcagtgagccgagattgtgccactgcactccagcctgggcgacagagcgagactccgtctcaaaaaaaaaaaaaaaaccccaaatcttaactcttactgctaagtgactgctttatcgaaactgttctgtttcgggacatttgattctggtagagattttgagacctgctttgaagaggacaccaacatttcagtcacacagcaatgctcctgtcttacctgggatccatgtgggaggatgcctcagtgggggatttgatctgtgttttcaatttaacctcacatcttactggaatggatggattcacagacctgggggtcgcccattggactgggagtaactacgttggaattacaagtaggacaacaaagatgactattaaagaaagcctcctgagtgctggaagcacagcaggcgtgggtctgtccactcactgtaatgtgatttgcacaggaaaacatcacatagggcacatcaactcaggaaagatagtcgttgaaaagctacctcagctgggcgtagtggtcacgcctgtaatcccagaactttgtaaggctgtgaggcttgtggatcccttgagaccaagagtacgagaccaacctgagcaaaacagggagaccccgcctatgcaaaaaatacaaaaattagccaggcgtggtggtgcactcctgttgactcagctattcaggaagctgaggcagaaggaccacaagaagtcaaggccgcagtggggtataatcacatcactgcactccaccatgggtgacagaggtgagaccctgttgcaaaaaaaaaaaaaaaaaaagcaaaagaaaagctgcctccatttagcaataatttcaaacatgatgtttgggtacaaaattggtgtacttaatggatatttctgatattcttaactaaatttgaagctgtgagggaagacaaactcagggtccacagggtgggaaaagtccacaagatcaccctcaagtgccgtcattctctaggaccccgagagccctagcggttgttacgcttgcagttatgatttattacagtgcaaggctacagattaaaatcaaccaaggcaagagatgtatggggcctcttgggggccaaggtgggcggatcacttgaggtgatctggacggttccagacacagggctttcctttgtctcctccctgtggagttgaagacagcgctgatgttcccggtgacgttgacacagagcactgccaaccagagaagcctccgtgtccagaggtttttttttttttttggagatgcagtctcactctgtcactcaggctggagtgcagtggcactatcttggctcactgtaacctctgcctcctgggttgaagtgattcttctgcctcagcctcctgagcaactgggattacaggctcgcgccaccacgcctggctaatttttgtattttttagtagagatggggtttcaccatgttggccaggctggtctcgaactcccgaccttaagtgatccgcccgcctcagcctcccgaagtgttgggattacaggcatgagccaccgtacccaccctgtgtccagcatttttactgggacttggtcacaaagacacagctggctacccacgtggctgacctccatctccagcccctctgcaggtgagcagaaactacatagcccaaagccccaacctaggactggtcccagaccccacgtaaacaaagacagccattaggtgtgacattctaaggactcagagatcacctcccaggagccccaggcaaaagccagacctcatttggggcgaagttacattcttttttattattattattatttgcccatcattgtctagaagttacattctgtatgacacatctgtcagatccctggaagcttcctcgccaccgactgcatggcaggtggtgctcatgtcactcggcccttccttggccccacacagctgcaccaggctgagaagagcttgaatggaataaagtcagacacagctaacagctcacttttttgtctccaactttgaattgctcctttccaagaaaagaaaaaaaacttctttttgtttaattggatttttttttttatttattttttgaggcagagtctcactctgtcacccaggctggagtgccatggcacaatctcggctccctgcaacctccaccttccaggttgaagtgattctcctgcctcagcctcccaagtagctgggattacaggtgcacaccaccatcatgcctggccggaatttttgttttttagttggctctccagaaccctctaagtagttcagctctgcaattgagttaaatgtgaagcctgaaaagagactggcatctgtgtagacctgagttctaacaattcaaagagtgaacacgggacgttgtcctctggattcggtgtcaggagcctgcctcgccgagctggagagtgtgcccatgactgcaggtgggagccacatggtccgtctaggtggcgacacctgaggacagaagtggtttagctgggcacccgctgctgtgttggggccagacccttttggagaggcagggacgcccttcctgtcaggtggaatcttttcaaatattgcttttgatcgttggagatacttgcagccccctagttcgtgttttattctggcagaattgtgtttgacgtgacctctgtgttgacctcatcatacgtgtacagttgtcttgcctgggaatcttatactctgttcttctgcactcagattcacagccatgaggccgctcctcccaaggccctggagtgtggcactgccagctgtcacagccacggtcctttacattgtatacacagagtgcagtgacatgcccctcctgctcaggggccacagtaggaacaggctggagtgttctgtggtaccatgccggcagtgctggcttctgctgtccaggggcttgtggtggctccagtgggaagggccacgtaagcagaacaggaagtgtgagcagtgtccactgggaggagagggacaagtgtcccaggcagagaggacacagtgcatgcagaggctggagggaggctaggggcttgagtggggctgcgccagcaccaggggcctcacaggggccctgggccacacacctgcccttagccaagggcgtttctccttggtggtttgaaatctcaaaccacattgaggaacctgccagaaatcgaaaccagaattaagaaattaagttacatgtaggagattttactttaaaatcagaacatgcagaaacgttctctgtggcttcgggtcaggttcgggcttgtggggctgtacactgccagttgataccttcttccctgggttctgtgtttttttttttttttttgagacagagtcttgctctgtagcccaggctggagtgcagtggcacagtcttggctcactgcaacctctgcctccctccctgggttctttatagcagtcagcagctggtggctgaggcatttggggcactgtgtccaagtgtcaaggccgcatgtgtgtcagggggcacacccttggtgtgcttggtaagggctcagagaagggcatctgctggtccatgtgggctcagccagcagcctgctaaagaccaccccgccagccaccagcctgcctgcgacagtgatagggcagagatgctgctacaataaagaccatgcgggccaggcgcaggcgctcacatctgtaatcccagcactttgggaggccaagccgggctgatcacttgagctcagaagtttgagaacagcttggccaacgtggcaaaaaccccgtctctattaaaatacaaaaattagccaggcatggtggcactcgcctgtaatcccagctacttgggaggctgaggcaggagaatcgcttgaacccaggaggaggtttcggtgagccaagattgcaccactgcactccagcctgggtgacagtgagactacgtctcaaaaaaaaagactgtgctagacggtggtgttgaacttgaacttgatgcttgtgctgaggtcaggagacacgtgcacagcttcagggctagaggggcacaatggctgcagactatgctcgggcagctcggaaagacggtgacgggtccaggctgccgcagctaagcctcacaagagctctggccccaccaggcgggccctctgggttccattcccactccccactgcctggaggcagcagccctgtggttactgtaggagggacctgaatgcagtgaagatctgcactccacacctgtctctgtgcctcagtctccacgtctgcagcacaggggcctgactgaaataacgtggccaggcacacagcccagacgccagcactgtgtgcactgtgggaggggacgatggtccctagcccagggcctgagctgctgccttgccaattcgtggtgacagctttggcctgggtctggcaggggctggctgctactgctgaaggcctgtctgcactgtttccctgcctttccacaagcactgtccctcctggctcttcagagttgagtggttataccttgtgcaagaaaaacaatgaaacagattgtctgaatgtttcagacctgcctgaaacattctgcaggagaggtcatcccaaggcttgaaagtgtttgtcacactccttcaagcccccagggcagggcccctgagggaagggtgcaggtggagggtgggcaggagtgggagccattccttggggacaggggggctcctcagggctgtctggcccttggcctgtggttccaggtctatggtctgcttggcacatagcctggaccctggtgctgtgcaggcactggctggatgagggcaccgagcagatgagccccaggcatgcccacttatgggcataggctgggtgcagggcactgggtccaacataaccatggcagagggctcagggggcctaaaagtcatggatggagttgcccacgcagcctgcggtcaggttccctgtggagccgtgctggggttctgcgcctgccccaggatttgctggaagaagctccccctcctctgtttgtgagtcgggccctacccccaagtctccccctcagtgatagagacctttacataacacaaataaacaaggcaactggtttagaagaatgagtctgaaaactagaatggcgtgtttaaggaaagcttaggacaggacaattagagacagaggtgcaggtgtgtggagttggcagcaggaggcctgggggagccgctcgtgcctttccctcctgccctggcctcccttggaactcggagcagccccctgccttgaggaggcccttcctttcagtgagcctgtgccgcagtcgtccgagggaacacagtggggacatatttccttttttttttttttttttgagacagagtctcactctgtcgccaggctggagtgcagtagcctgatctcagctcactgcaaattctgcctcctgggttcaagcaattctcctgtttcagcctcccgagtagctgggactacaggcatgcaccaccacgcccagctaatttttgtatttttagtagagatggggtttaaccacgttggctaggatggtctcgatctcttgacctcatgatccgccagcctcggcctcccaaagtgctgggattacaggagtgagccaccatgtccggccggaaatgtttattaaaatagcagatgaggccgggtgctgtgactcaggcctgtaatcccagcactttgggaggctgaggcgggtggatcacgaggtcaggagttcaagaccagcctgaccaagatggtgaaacccatctctactaaaagtacaaaaattagccgagcgtagtgagacttgcctataatcccagttacgagggaggctgaggcaggagaatcgcttgaacccaggaggcagaggttgcagtgagccgagattgtgccactgcactccagcctgggcaacagagcgagactccgtctcaaaaataaataaataaaaatagatgatcatagacaggagggatgaagtagaagattcaaagcagcttaaaaaaaggaagtaaaaaagaaataaggtcaggagacaagattgagtgactgtgaaacatcaacaataggcagatttaaaataaagtcaggaaatagctagatcaaagaatagaaaggtgaaccaggtgtgatatccacctgtagtcccagcttcttgggaggccaacgcgggaaaatcacgtgagcccaggagttggaggcaccgctgcactcaagcctgggtgacacagtgagaccctgtctcaaaaagcagcaggaagagaggctggcatgtggggctccagggggtgtgaaggagggtccacaccctccttcctccacctggccatactgagcagcacattctctgagccaacggcccctacaaacacccaccctttcctcctggtagcccagagggcgcccctgcctgctcacttcccaatgtcgggatcctgtgatttctgcctcttcagaaaggacttgaggcattttctgactcagagccactcaggattccaggacctcctgtggtgacaacagggacaccagtagtgatgaattcagaaaagagcgaacgcccctcaagctgccctcccccagccctgcagacagtggccatgggcctccctgcactcaggaccgactgcacctgcctgcggcgtaggggagctggggctggcctttccttttcatcttcccctggcactgggaaatgctctgggtggtgccatgtataacaccctttgtcacagtgctctcatttcgtcgtgtaaaaggccagtccccgcctcgcagtgttggggcagccagcacaggcacgtgagacaggagccacacctgggttctcatctggcatctgcctcttgccatgctcaggttcttgcctccagatatagggcatcaaactaagtggtttccaaacttgggttcttggtggggagtgagatcagggtttcttaaaaactgcacttggaggctgggcacggtggctcacgcctgtaattccagcactttgggaggccgaggcgggcggatcacctgaggtcaggagttacaaaaaacggaacctaggctcatgcctataatcccagcacttcgggaggccaaggctggcgaatcgctggaatttaagagttccagaccagcctggccaacgtggcaaaaccctgtttctactcaaaatacgtaagttagccgggcatggtggtgggtgcctgtaatcccagctactcgggaggcggaggtttcagtaagccaagattgcaccactgcactccagcctgggtgacagagtgagactccgtctcaaaaaaaaaaaaaaaaagaaagaaattcaaatctcagtgtcgataaatgaagttttgttggaatgcagccaaagcccaccgatttctgcgttgtctgtggttcccttcatggaacagtggcagaactgagcagttgcaacagaggcaggcccagcaagcctcaaatatttacactgagctgagcgcagtgactcacacctgtaattccagtgctttgggaggctgatgtgggaggatcccttgagcccaggagtttgagaccagcctgggcaacctagtgagaccccatctctacaaaatattttttaaattagccaggtgttgtggcgtgtgcctgtagtcctagctacttgggaggctgaagcagtaggatctcatgagcccaggagttggaggcttcagtgagctaggatggcaccactgcactctagcctgggcaacagaacaagatcgtgtctgtaaaaagagagaaaagaaacagacaattcctagactgcagcaggtgtttgcagtagtgcatccagcaaaggactccccagggaaggaaatgggccaaagatgggaacaagcgctgcttggaagagcctgtgaaacagtgcttggcttctctgcacaacaaggaaacgtgtttagggccacattgtagaatggctacaaggacaagcaccactcacgctggctcagtatctcccaagtagagcatttccccaccctgtgacctagagtatcttctcccagataaattcctaggagaactgcaaactaaacacttgttcctgagtgtccacagacacttgcttcctggtgtccaaccctgagcacagcccagatgcccggcagcgggaactgggcatggctggtgtgtgcccacctcgggacctgctgctgcactcggcaacagggacagcaaggaggcaggaggccaggccaggtttgggggctcccctgtgtgtttctgcatcatcaacttgaagaagcagccaacctcggcccaggatcatccctgggggaaggactgacaggagcgcatctttagcctcatgcttaagatctgtgcattgggccaggtgcggtggctcagcctgtgatcccagcacttttgggaggccaaggtgggtggatcaggaggtcaggagttcgagaccagcctgaccaacatggtgaaacccgtctctactaacaatacaaaaattagctaggtgtggtggtgcacctgtaatgccagctacttggaggctgaggcaggagaatcgcttgaaccctggaggcagaggttgcagtgagccgagatcacgccactgcatgatgtgtgcattggtgttaagtcagctattaagaggtgtgggctgggtgtgtgtgggggtcagaggaggtgatgtttgccctgagatgaggtcagagcccacattcccatgggggtggactcccctttgtaggccttgacacgagcatgggagcggagctaggggcactgacatcaaaggtggtggcgcctatccagaggactccgggtttcattccaagtgcggggaggctgcagcatgtccctctttaatatagaggtgagggaggctctcagcaccctgcctgttgcagggaagcctgaggacaggacctccagggaactctgcaccagagcggaatcctcagaccggcaactgggtggtcttgattcatccagaacgtaattctcctagaggtctgggaaggggtgctcttgtaccttggttttgtgttttgtttttgtttgttttttgagacagagtctcactctgtcgcccaggctagaatgcagtggtgcgatctcggctcactgcaacctctgccacccaggttcaggtgattctcctgcctcagcctcccgagtagctgggattgcaggtgcctgtcaccacgcctggctcatttttgtatttttagtagagacggggtatcactatcttggccaggctggtcttgaactccggacttcgtgatccacccacctcagcctcccaaagttctggggttacaggcgtgagccactgcgcccagccgcaccttgttttttttttgctgcctgtagctgtttctcattagcctgatggaggtggctgttggggtggtggggtgcttattataaagccttctgctgtcacagccctggggtctcacttcctgggctctctgcatagggagccgccctccagggcaagggccacagtgtgcagtaagccccccatggccacagggcagggcgtttcaagccaagagtctgcactgtttgctggccactaagggcattgaatggatcacaaaactggcttttttttcccccagtcaaatagaaatggggttttgccatgttgtccaggctggtctcaaactcctgggctcaagcaatcctcccacgttggcctcccaaagtgctgggattacaggcacgagccaccatatctttaaaaatgtaatagaatggaaaatggcaaagcgcgctgcttttcatagaagagactatcgcattggggttcttctgttgcccctgcctgtgctgcacgtcctgcttcacagtgtaaagcgcaactcttgctgtgccttattgtaacaggtatagggtggatgctgccatcatgaagagagaggagagctctttgcttataaaattccgtagagtggagaacaggatgtgccggcttaggagagggaagaggtacaggcccgctctgcccgagctgcagatgggacacacatttcccgactcagaggggagtcgtgtctttctccagggtcaccgagcagcaagcgcatccactgtgtgttcttattttctgagcctgtggactgggtttaccaacagttgcctgtggcagagccggccaccagcccgctcataggaaaaaggaagcctgtgcctccagggagggcccacgatgggaatgcagtctgagaagggtatgtgctcccatgctggaccggctggtcccacacccaggaccaaaaacacctcctggcaggagatggggagatgtacttcatgaacacacgttggggaaggacactcctggaaggcagaggctcaaggcgggctgtgtccaggccaggagattcactcccacctcaatttcctcctcagcacggctggcctggcactggtgcctgcttcagagtttagtgtgtgtaaagtgtggctggcccagcaagcaggggatgatggcggttgtcaaggccaggggaggtgcagggacaggattctggctcccgtgtgtaacgtctgcatctcaggaggctctcatgttagaagctgggtcaggggcttcgtgatgcacacaaacaccaaacaagcaggaggccttccgggatcctgctcacgagcagcttcctggaggcaagcctggcccgtctgccccttggtgacatcaggaccccagcaacagaaccagggaagccaccatgttgtcgctgccattttccagcgtggtaaacagaagcaagacaaggcgcactcaggacacccaaacagacggcggggccagccagtggcatgggcgggctgccctgccctctggaattttctgggaaagaacataaggaaagaagcggtgctgatgaggcagctggagttatcaggacccaagctcagctcctccttcccatcaggccccgttggccacttttaggcttcgtccgcctggtggctccctgcttggggccgttccctggctaggcccttcctctgggccaaagcagagaggagagcgcgtttgccatgcgttctcattttcccagcctgcgggctgggttctgtcagagcaaggtcagctctcagagcttctgtccccacccaccctgtcctgctgagccaggctcaggtatgggtaagagctgggagcgctgtgcacgaggcctggcagcatctcatcactgccgctgtaccgagtgcacaagggcgcttcctgtggtgttcagggggttagatcagtccccagtgaggacagagcagagatccagatgcatcccaggccggctgcagtggcttctgcctctaatcccagcacttcgggaggccaaggcaggcagatcacgaggtcaagagatcgagaccatcctgaccaacatggtgaaaccctgtctctactaaaaatacaaaaattagccgggtgtggtggctggcatctgtaatcccagctactcgggaggctgaggcaggagaattgcttgagcccaggaggcagaggttgcagtgagccgagatcattccattgcgctccagtctggcgacagaacaagactctgtctcaaaaaaaacaaaaaacaaaaaaatgtatcacaggcctgtttgtgtggttgtctctgggaaatgttccagaagctacaagaaagcacatgtgcaggccaggcatggtggctcacacctgtaatcccagcactttgggatgctgaggcgggctgatcacctgaggtcgggagtttgagaccagtctgaccaacatggagaaaccctgtctctactaaaaatacaaaattagcctggcatggtggtgcacgactgtaaaaaatcccagtgactccaaaggctgaggcaggagaatctcctgaacctgggaggtggaggttgcagtgagccgagatcgcaccattgcactccagcctgggcagcaagagcgaaactccgtctcaaaaaaaaaaaaagcgcatgtgcaagaaatagctcctgagctgagttggaatttctcatccttaaacaatgtgggaacctgctgaggtggggtgggggctcccgggtgggcggactcgggggtgatagccgccggttctgccttgcagcagcagtggacgtcagctcagcgaggtcttcatccagctgccctcgcgaaaggagctgcccgagtactacgagctcatccgcaagcccgtggacttcaagaagataaaggtaaccctgacgttgtacctgcgccccgcatgtgcccggaggggagtctgacccaggggcacccccatctgagagctgtggtgtgtgggcagaatgaccagaaaccacctaggcggtgccttgggctacctggttagggacctggtcgtgggcttttggggttccttgtaagggttgggggtgtcctgagggatgtcagtgggcagtcggtgttgggtgttccttcaaggtcccactcacttagtgctgggcctcagtcatgcagttcccatgcctagtgagccaggttaccgaggctggcgcttcggccacatcctcataggcacgaggaatcctagcccgtggggtctccagcacacagccaggcctgcgggcaggcgaggcggggtcctgaggtaagacctgctcctcccgtccactgcaggagcgcattcgcaaccacaagtaccgcagcctcaacgacctagagaaggacgtcatgctcctgtgccagaacgcacagaccttcaacctggagggctccctggtgagggcaccgctgggggttggggatgggccactcccacagctgggctttgacccaacccgcccctccttcccttctgaattgatgggttaaaaacaagtcccgctagctgtggtggttcgtgcctgtaatcccagcactttgggaggccaaggcgggaggatcacttgagaccaggagttcacgaccagcctgggcaacataacaagaccctgtctttaaaaaaaaaaaagaaaaaattaaaaatttccaacttgggatattttagcaattacaaaagcagtatgtatttaccgaagaaaataaagataggcacaacagaagaaatagactcagagtcctctgtctgttggaattttattttaaattccctggggcacattctcttcaaaggaatcctgtgggtttgttctttcctgtgatagaattgacacatacacagcctcaacttggcaaactttcttaagtgtctttgggattgattcctctcagaaaaaagacttgactttgatgagtttgggaaagatgctggcttcaacaaggggcatgtatttccaatgttattgcagacctcagagattgtgcagaaggagggaggcacctgcagctattcccaaaccagtgtgcctgacctttcaccctggagcatttcagaagtctgatgctcgggcccctatggaggaagattatggagagggccttccaccctgggtgggctgaagccccgacccgctgaggctcgcattggccactgatcagctgtccaggggcaacacagggctggggctggggctggggccagggccgggcaggcagccctccagtcgggcccatccactcaagcccctggtgtctctgcccagatctatgaagactccatcgtcttgcagtcggtcttcaccagcgtgcggcagaaaatcgagaaggaggatgacagtgaaggcgaggagagtgaggaggaggaagagggcgaggaggaaggctccgaatccgaatgtgagtcccgggggggttcaggacgccggggttcacgctggcccgagagcccccaaggccccagcttttcacagccctcccggctcccagacgccccttgctgtgggggtgctgcattcccagagctcaaggctgtctttccctcccggtcccctccagctcggtccgtcaaagtgaagatcaagcttggccggaaggagaaggcacaggaccggctgaagggcggccggcggcggccgagccgagggtcccgagccaagccggtcgtgagtgacgatgacagtgaggaggaacaagaggaggtgaggccgggcccccgagcaggcagagctggcatgtggcaggaggcatcccggggccctgatgggacagccctgtggggcggtgctcccacgcccccacgctgcaggtgggaaagctgaggcttgacctgccatggctgaccccaggtcacacagccagtatgtggcagggctgccactcaaagccaagcctgtgtgaccccggaaccagctctcagtacccgtgggtgtctggggactgggggacacgtgagtcctcaggacaggcagcaggcggtcccagggcaccagggctcctgggctgaggccgggcaggccagggcttgattagggttgggtaggaggtgctaggattggggacccaccagacagtgccccgtctcctcagtggcatagagaatgggcagaaacgccaagaccacagtggatagtttttggggtgcagtggggagccggagaagatccacttgctggctttaaataatctcacctctgtctctggcccttcctggctgtgggacctggcaggtcactttgcttctcaagcttcagtttcctcttatgcaaagcaaggaggctgcatggattagggggctgcccccaccgaagggcctggctcccgctgaagcccagcgaatgccattttgtcatcacagaagcagcaaatttcagtgcctgggaattagtctgacgaaagacgcacgtgacgtttgaggacattcatgaagtcctcatgtggaggggaggcccctgtgtcaggcaggagggtctgggctgtgatgctgtctctcttgcctaatccagagcagggtgttttatggcccatgccaggctgtttaaaaaggttttatgaggccaggtccagtggctcacacctgtaatcccagcactttgggaaactgaggcaggaggctcacttgagcctgggaggtcgaggctgcagtgagccgtgatagcaccactgcactccagcctgggcaacagagcaagaccctgtctttaaaaaaaaaaaaaaaaatatatatatatatatatatatatatatatatatatatgaaagagcaaagatctttcacagtcaggaagaaccaagatggtttggaagctgtaggtcaggggccaagggccaggcaggtgacatgggacagagcagggaaggcacgtggagcctcgaaggtcccgagagggccgagtgtggtcacagggactcgtcctgtagagaaacatgaagtttgggcatggccatggcgccatctcggctcactgcaagctccaccccccgggatcgcgccattctcctgcctcagcctcccaagtagctgggactacaggcgcccgccaccacgcccggctaattttttgtattttttagtagagacggggtttcaccgtgttagccaggatggtctcgatctcctgacctcgtgatccgcccgccttggccttccaaagtgctgggattacgggcgtgagccaccgtgcccggcccacatcagtgttttcttgagcaagtttatttaaagtttggcaggtccctggcaaggtgccctggcaggggtggccaacgcacactctctcctcctgtcccctctccaggaccgctcaggaagtggcagcgaagaagactgagccccgacattccagtctcgaccccgagcccctcgttccagagctgagatggcataggccttagcagtaacgggtagcagcagatgtagtttcagacttggagtaaaactgtataaacaaaagaatcttccatatttatacagcagagaagctgtaggactgtttgtgactggccctgtcctggcatcagtagcatctgtaacagcattaactgtcttaaagagagagagagagaattccgaattggggaacacacgatacctgtttttcttttccgttgctggcagtactgttgcgccgcagtttggagtcactgtagttaagtgtggatgcatgtgcgtcaccgtccactcctcctactgtattttattggacaggtcagactcgccgggggcccggcgagggtatgtcagtgtcactggatgtcaaacagtaataaattaaaccaacaacaaaacgcacagccttgcctgcaggtggacttgtgcctggctcccaccgtttctgccagcaggagtggcgggggccacctcatgtccaggtccctgtccttctcctggcaccagaacccatggggcccgtttcacagaggaggatactgaggccccggcaggggaagaggacttgtctggtcacgcgtgtggcctttgccactgcaggtctccagcatttgttcagctgagacctacagtgcagggagcaggcagctccatccgttccctgcccgtggcccagcctgggttggggagaccatcacagaaatgggcagatgccacatagagctctcagggccatgatgcaggaagctcagggcataatgggagcccaggtggtcagtgagggaagggacggagccgcctgctccctttcaaatccagaacataatttgagtttttgtttttttgttttgttttgttttgtttttgagacgaagtctctgtcacccaggctggagtgcagtggcatgatctcggctcaccgcaacctcagcctcctgggttccagtgattctgctgcctcagcctcctgagtagctgggattacaggggtgcgccaccatgcccagctaatttttgtatttttagtagagatgggtttcatcatgttagccaggctggtctcaaactcctgacctcaggtgatccacctgcctcggcctcccaaagtgcaaggattacaggcatgagccactgtgcccagcccctaatttgtgtatttttagtagaggcagggtgtcaccatgttggccaggctggtctcaaacccatgacctcaagtgatccacccaccttggcctcccaaagtgctggtattacaggcatgagccaccgtgctttgagtttttttacagtaagtcttggccggagtgcagtggctcaatcttggctcattgcaacctatgcttcctgggctcaagcaatcctcccacctcagcctcctgagtagctgggattataggtgcacgccaccatgcccaggtaatttttgtttttgtttttgtttttggtggagacagggttttgtaatgttgcccaggctggtgtcaaactcctgggttcaagcagtccacccgcctcagcctttcaaagtgctgagattacagacgtgagccactgtgcctaaccaatttgaattcttatcatttttgtctgttcattaagagccattattagtgggtcactgtcgtcatacttggctttaattcttgagatgtggtttcttctagctctttgaacctttttttttgttttgtttttaattgagacaaggtcttgctgtgtcacccaagctagagtgcagtggtgtcatcacagttcacaacagccttgacctcctgggctcaagtgatcctcctgcctcagccccctgagtagctgggaccacaggtgcacaccagcacacttggctaattattattattattattttttttgtagagataatgtttcgctttgttgcccaggctggtggtctgaactcctgagctcaagtgatcctcctgcctcagccgctctattttttttttttaatcgagacatggtattgctctgttgcccaggctggagtgcagtggtgggatggtagctcaacttccagagctcagatgatcctccctcttcagcctccagtgtatctgggaccacagacatgcaccacccagcccagcttgaacctgtttttagtagctgctttgaagccttttggtccaacatccggatccattcctccacagaaaggttctgttgactcctttttgtcctcagcgtaggtcacactttcctgtttcttcacatgtctggcaagcttttgttgtcagaaagtagacattgtatttttatttatttgtttttaattttgttatgtttttgagatggagtctctcactgtcgcccaggctggagtgcagtggtgcgatctcggctgactgcagcctccgcctcctgggttcaagcgattcccctgcctcagcctctggagtagctgggattacaggcacccgccaccacgcccggctaatttttgtattttgtatttttagtaaagacggggttttaccatgttggccaggctggtctcgatctcctgacctcaggtgatctgcccaccttggcctcccaaagtgctgggattaaaggcgcgagccaccgcgcctggccttgttttgttcttaattgttgtttttcttttctttctttcatgtttcccctcggagacaaggtcttgcgctgtcactgatgctggactgcagtggtgcagtttcagctcactacagcctcccgggctcaagccatcctcccacctcagcctcccgagtagccggaactacaggcttgtgccaccacacccagctaattttttttttttttttttttttttggtagagacagggtttctccatgttgcccacggtggtcttgaacacctgggctcaagtgatctgcccgcctctgcctcccaaaatgctgggattacaggtgtgagccaccgcgcctggcccaattctcatttttatttagaaggagtcacccctgggtcagccaagctgagacatcagttggtggttggtcagaacttgtgcccaaatatgctgagtcagcggctctgcccgggcccaaatgctgagtcagcacctctgcccgggcagtctgcaggctggccctacctttgctttctgcctgtggttcctatcagggcacgcacttcagttctgttgggcagggagacgtgcatcagactctctccagggcatatgtgctgtcttgcgcttgcgcgtggcctcccaaacccctagggatacctggggccagctggggcagtctctgtctcgacctccttttccatttctggctagtttaccaatctgtttcatccttaggccagctgatgaccttggccctctcctcccgagatccctgcagcttccaacagtgaggccctccagcagtgaggctgctgattttcatggcctggctggagctgggggcccaggccaggagcagccccaggcaaaaatcacctcccgctgctcttccctgccactcagtactttttctggaataaacatttcctcactgggtgaacacctttgacgagatcttcacagtcctgggatggttgctttggacaattctgtttagctttattgttgcttttagggagaggatttgccaagatcttcactccaccatttgggaaaatccacatttcgtttgttgcaatagctttggctttattttaatagattataatttatttattttttatttatttatttttgagacagggtcttgctctgtcacccaggctggagtatagtgacatgatctctgctcactgcaacctccgcctcctgggctcaagcaattctgccacctcagccttttgagtagctgggattacaggcgtgcaccaccatatctggctaatttttttgtatttttagtagagacaggattttgccacgttgcccaggctggtctcaaacccctgggctcaagcagtctgtccacgttggcctcccacagtgctgggattacagatgtgagccaccactcccagccagaatttattttaacgtttatggaaaaccaactcaccaaacctatgatttcatggttttcagaatgaggccaatttaaaaataagtgccttagtctgggggtgttggcccatatccataatcccagcactttgggaggctgaggcaggaagattgtgaagattgcttgaggccaggaatttgagaccatcctagacgacatagagaccccccatctcaacaacaaaaataaaaaaattagccaggcacagtggtacacatctgtagtcctagctacttgggaggctgaggcaggaggatcacttgagcccaggagttcgaggctgcagtgagctgtgatcccaccagcgcactccagcctaggagacagaggaagaccctgtctcaaaaaaaaattttttaaggaaaattttttaagaaaaaaaatgaggggagcctacagaaataactttgagtgtccacctgtgcaaaacccatgtcatggggacacagggacatgttagctgtggtgcagatgagtggtccgggctgcaggcctgtctgactcaggtctcagacatcggctttggcctgagggcctggaaccagcttggtccccatatggcagtggccccaagccaggggccttcacctgtgtgacctggtgacagctgctggctggctgctgcccttcctgacctttgctctccacacctgcccctctcgcaggcctttcctctgtctttcagtcccgctggccagtgcccttctcccaacaaccccaagggctgggggacttcattcctgtttcccagatgacacaagtggagctcggggaggttgagccagtggcctaaggctacacagatctgagcttgggtttgggggacatgagactcctcaggggctgccacctgctctggggtctggagcaaggaccctgagacttgaaagttgaaatggcgcctggaaccaggtggtggactaagcaatggcgggcaggtcggtgtgtccccaggagtcaggagaggctgccacaagacaggagtgagcaggaccttaaagctgaaacgccggatggtcagggcatgatgggacctgacacggcctggactaggagggggtgggaagaataatacgggacatcatatgtggcagggggtcatgcgctttcccatccagccatctaggctggctctcctagattctttttgttttgttttgagacagagtctcgccctgttgcgcagctggagtacagtggcaccatagcctctcgagtagctgggacgacaggcgcgcacccacacccagctaatttttgtattttcagtagagacgtggttttgccatgttggccaggctggtgtcaaactcctgacctcaggtgatccgcctgccccatcctcccaaagtgctgggattacaggcatgagccaccaggcccggcctctcctagagtcttgcttccatcaagtcatggagtctccttttccttccctggagtttgagtgtacttgggactcactggtaaccaacagagttcaatggaagtgacatcatgtaactactaagagtaggtcacagaaagcacagcttccgccttgcttgctcgctcactcttgaatcaccagctgccatgtaacagcctgacttcctggagcctgccattttgtgaggaggcccaaccaagcccatgctataaggccaccaagaccacgggaagagaaagcaatggctgccccagccctagccctcagctgtcaccagctgcatcagagaccctgagcccgtaccgccgagctgagcccttcccacattcctgacccttagaaaccacaagagctaataaacacattgttttaagccactaagctgttaggcagcaacagtactggaacatcataaaataattttttaaatgacagggatctaattaaacgtggaaggatcttgagaacattgttgaggatagaacagcaggctgcacagtgaagcaaatgtccagcaagatggacacacactggatcctggatatgtgttctggaccatgtcactagtacatcacatttagagaaagctgtgtcaggacccaccccaaacacaaaacagcctgaactgctgctgttacccttggcagtgggggagggaagggtggcgttaagagattccccaagatggtgaggtcacctggccattttattttttatttttattttttatttttgtatatatatatatatatatatatatatatatatatatatatattttgagacagagttttgctcttttgcccaggctggaatgaagtgacgcaatctcagctcactgcaacttttccccccaggatcaagtgattctcctgcctcagcctcccaagtagttgggattataggcacccgccaccacgcccagctaatttttgtatttttagtagaggcggggctttgccatgttggccaggctggtctcaaactcctgacctcgtgccacccacctcggcttcccaaagtgctgggattacagacatgagccactgcacccggctgcctggccattttaagagccactttttgggccgggtgtggtggctcatgcctgtaatcctagcactttgggaggccgagttgggcagatccctttttttttttttttttttttttgaggtggagtcttgctcagtggcccagccatgagcgcagtggtgcaatcttggctcactgcaacctctgcctcgggttcaagcgattttcctgcctcagcctcccatgtagctgggattacaggcacgtgccaccatgcccagctaattttttgtatttttaatagagacagggttttgccatgttggccaggctggtcttgaactcctgatctcaagtggtctgcctgcctcagcctcccaaagtactggcccagtttctgtatgtttgaatagagacaaggtgtcactatcttgcccaggctgatctcgaactcctgagctcaagggatcctcccactgcagtctcccaaattgctgggattatagggtgtgagccattgcgcccagccagaacctcttcttgattcctcaccaatgttttggtcaacagcacacttggattctagtttctgtcatggtctcaaagatttctactgaaataagaccgttcttggtcgtgccttgtggctcaagcctgtaatttgagcactttgggaggccaaggtgggcggatcacttgaggcaaggagtttgagaccagcctggccaacatggtgaaaccccatctctactaaaaatacaaaaattagcggggcatggtggtgcatgcctgtaatcccagcaactcaggaggcagaggcaggagaatcgcttgaacccgggaggcggaggttgcaataagccaaggtcatgccactgcactccagcctgcccaacacagcaagactatgactcaaaaaaaaaaaaaaaaaaattcttacctgctggagcgttaatatgaatgaggtgtccagagcccagctcctcctgatccacccatgtctgattctgcttctgtgtccccacctcacaagtggccactggcctacaaggagtccatgtcagctgccatccctttccatcaggccacaccagccgatcccccctcacccactcattctccttcctaaatatcccctcaacccacccacctctctctccacccttgaccttcacctgcaccagcctcagcctatagctggcctagaccagcatggtcaactccttggtttctccgcttccacccacgctgcgctccatgtggccagagggttctaaactcttgcagttcctcaatgcacaagggggcctggtcagctgagcctggcacctgcccagccttctctaagcctcagctaaaattctataccacatacttctagacactggcatgcgcaggggcctgttgttgcaacccctcatgtggtgaatctccctcagagccctcagacatcagttcccgccccttcttgccttctttggtaatctggggcaggaagcacttggggcgggtcattgtggctcacgcgtataatcctagcactttgggatgctgaggtaggaggatcgcttgagcccagacgttcaagagcagcctaggctctacaaaaaagtcctacaaagctcagttttcaaagcatatttctggccgggtgtggtggtgcacgcctgtagcagccagctacttgggaggctgaggcaggagaattgcttgaacccggaatgcagagagtttgcagtgagcccagattgcaccactggactccaacctgggcgacagagcgagactctgtctcaaaaaaagaaaaaaagaaaacagaaaaggaaatgctagtgtgtatgctgaataaataagcactttgagaagttgacagggaggctaggcatggtagttcacacctgtaatcccagcacactgggaggctgaggcaggaggagcacttgagcccaggagtctgacatcagcctggacaatatagtgagacaccgtgtctacaaaaaaaaaaaaaaaaaattatccaggcatggtggtgtccgcctgtagtcccagctactcaggaggctgaggtgagaagataacttaggttgaggggggcaaggctgcagtgagctgtaatcccaccactgcactccagcctgagtgacagaggaagactttgtctctacaaaaggaaaaaagagaaattgacagaagagaagttcctcctacttctattttttttttttttttgagatgaagtctcactctcgtccaggctagagtgcagtggctggatctaagttcactgcaacctccccctaccatattcaagagattctcctgcctcagcctcctgagtagctgggattacaggcacccgccaccacacctggcttttttttttttttaaatagagacgggattttgccatgttgatcaggctggtcttgaactcctgacctcagatgatctgcccaccttggcaacccaaagtgctgggattacaggcatgagccactgcgcccggcctcttatttctttagaggccccaaaaaagaactgcaaagaagaaacacgagtgcattagaaaaactgttcaggctgggcacagtggctcacacctataatcagtttcagaggccatggcgggaggatcgcttcaggtcaggagtttgagacccccttggggaacatagtgagagtcctgtctttatttatttattatttatttatttatttatttatttattttcttgagacggagtctcactctgtcacccgggctggagttcagtggtgcaatctcaactcactgcaagctccacctgccgggttcacgccattctcctgcctcagcctcctgaatagctgggattacaggcgcccaccaccacgcctggctaatttttttgtgatttttgtagagacggggtttcaccgtgttagccaggatggtctcgatctcctgatctcatgatccgcccgtctcagcctcccaaagttctgtgattacaggcgtgagccactgcgcccagcctcctgtctttatttttaaaagaagggcgcagtggttcaagcctgtaatcccagcactttgggaggccggggcgggcggatcacgaggtcaagagatcaagaccatcctggccaacatggtgaaactccgtctctactaaaaatacaaaaattagccgggcatggtggcaggctcctgtaatcccacctacttgggaggctgaggcaggagaattgcttgaacctgggaggcagaggttgcagtgagccaagattgcgcctctgcactccagcctggggacagagcaagactccatctcagaaaaaaaaaaaaaaagaagaagaagaagaaaggggggaaaaaaagccgggtgtggtggctcaaacctgtaatcccagcacattgggaggctgagcaagaaggattacctgagcccaggagtttgagaccagcctgagcaataaaatgagaccttacctttacaaaagaaattcacaacttaggtggtcatggtggcacacacctgtgatctcagctactcgtgaggctgaggtaggaggattgcttgaatccgggaggtgaagtctgcagtgagctgtgatcacatcactacactccagcctgggtgacagaattagactctgtctcaaaagaaaaagaaaaaaactggttataaatcctcttaataagtaaatgatagctggacatggtggtgcatgcctgtaatcccagctactcgggaggctgaggcagaagaattgcttgaacccaagaggcagaggttgcagtgagccaagattgcgccactgcactccagcctgggcgacagaacaagactctgtttcaggaaaaaaaaaaaaaaaaaaaagacgttctcctatttattagcatactgttcacaatagccaaaatatggaatcaacctaagtgcccatcaatgtttgaatgaataaagaaaatgtggtgtatatacacaatgtagtactacactgccattaaaaagactgaaattttggccaggctcagtggctcacgcctgtaatcccaacactttgggaggccaaggcaggtggatcacctgaggtcaggagttcgggaccatcctggccaacatggtgaaaccctgtctctagtaaaaatacaaaaattagccaggtgtggtggcgggcacctgtagtctcagctacttgggaggctgaggcaggagaatcgcttgaacctgggaggtggaggttgcagtgagatgagattgcgccatccagccggggcaacaagagctaaatccatctcaaaaacaaaacaaaacaacaaacaaacaaaaaaacaccagcatcactgaaatggatcataaactatgttcttttattgaacagaccagaagaaacctactttaacctttaaaaaagaaaaaggaaagccaggcgcggtggctcacatctggaatcccagcacattgagaggccaaggcaggcagatcatgaggtcaggagttcgagaatagcctggccaacagtgaaaccccgtctctactaaaaatacaaaaattaccagggtatggtggtgagcacctgtagtcccagctattcaggaggatgaggcaggagaatcccttgaacctgggaggtggaagttgtggtgagccgagatcgagagccactgcactccaacctggcaacagagcgagactccatctcaaaaaaaaaaaaagaaaagaaaaataacttgcccaaggtcacacagtaaaagacagaggtagggtttctgctcattgtgattctaaacggctgtccacaaaatcaaagttaaggtaaaatactctctcagaaggccccgtaagggcaggtggcactttttctttgaagcctgtatgtcagaattgcaatcagttacaccaacccatttaaatcagtaggattgcccgggggtggtgagtggtggctcacacctgtaatcccaacactttgggtggccgcagagggcggatcacttgaggtcaggagtttgagaccagcctggccaacgggcgaaaccccatctctactaaaaatacaaaaataggccgggcgtggtggctcacgcctgtaattccagcacttggggaggccgaggcgggcggatcacgaggtcaggagattgagaccatcctaacacggcgaaaccccgtctctactaaaaatacaaaaaattagccgggcatgtggcgggcgcaggaggctgaggcaggagaatgacgtgaactcggaaagcagagcttgcagtgagccgagactgcgccactgctctccagcctgggtgacagagtgggactccatttcaaaaacaaaaaacaaaaaactaaaaactgtgtggtggttccctctccagaaaataagtggaattaccataggacccaagcagttccccttttgggtatatcaccaaaataattgaaagcaggatggccaggcgcagtacctcacacctataattgcagcacttggggaggccgaggcaagcagatcacttgaggccaggagtagttcaagtgcagcctggccaacatggtgaaatcctgtctctactaaaaatacaaaaattagctgggagttgtggcacacacctgtagtcccagctactgaggctgaggcaggagaatcgcttgaaccccgggaggcggaggttgcagtgagtggaaatcacgcgactgaactccagcctgggcaacagaaagaaactccgtctcagaaaaaaaaaaaaaagtgggagctcaaagagattatttgcatgtccatgttcatagcagcattattcatcacagccaaaaggctgaatcaacccaagagtccgtggatggaagaacaggtaaacaaaagatggtgtatccattcaatggaacattatttggcctttaaaaggaaggaaattctcactgagcatagtggtttatgcctgtaatcccagcactttgggaggctgaggcaggggggagggggcggttcacctgaggtcaggagttcaagaccagcctggccaacatggtgaaatcccgtctctactaaaaatacaaaaaaattagccgagtgtggtggcacacacctgtaagccaggctacacgggagactgaggcaggagaatcgctggaacccgggaggcagaggctgcagagagccgagattgcgtcactgcactccagcctgggtgacagagcgagactcttgtcttaaaaaaaaaaagaaggaaggaaggaaggaaggaaggaagttctgacacaggctccaacacagatgttatgctcagtgaaataagccagacatgaaaggacaaatactgcctgatctcattcataagaggtccctagaattgtagaatggtgtgtgccacgggctgggagggggtgtggccagagtttcagtttgggaagttgagaatgttctggagatggatggcggtagtggtggttgcacaactgtgtgaatgcgcttaatgcctctgaattgtgcagttacaagtggttcggatgggccgggcgcggtggctcatgcctgtaatcccagcactttgggaggccgaggcaggtggatcatgagatcaggagatcgagaccatcctggctaacacggtgaaaccccatctctactaaaaaatacaaaaaattagccaggcatggtggtgggcacctgtagtcccagctacttgggaggcggaggcaggagaatggcgtgaacacgggaggcagaacttgcagtgagccgagatcacgccactgcactccagcctgggcgacagagtgagactccgtctaaaaaaaaaaaagtggttaagatgggccgggcatgggggatcacgcttgcaatcccaacactttgggaggctgaggtgggtgattacgaggtcaggagttcgagaccagcctgaccaccatggtgaaaccccgtctctactaaaagtacaaaattagccgggtgtcgtggcacacgtctgtaatcccagctactggggaggctgagttgggaggatcacctgagcccagggaggtccaggctgcagcaagccatgattgcaccactgcactccagcctgggtgagagagtgagaccctgtctccaaacaaacacacatgaaaaacagattttttttgccaggtgcagtggctcacacctgtaatcccagcactttgggaggccaaggcgggtggatcacgaggtcaggtgactgagagcatcctggctaacacggtgaaaccctggctctactaaaaatacaaaaatttagccgagcatggtggtgggcacctgtagtcccagctactcgggaggctgaggcaggagaatggcatgaacctgggaggcggagcttgcagtgagctgagatcacgccactgcactctagcctgggggacacagcaaaactgtctcaaaaaaaaaaaaaaaggtttttttaatttaaaaaggaaagaaaaggagagtgctcgtgtggcaggcacctagccctgtccagcgcaccctgagacagggatgatgtctcctccttgacctaagaccacaagttctaaccaattcaaccgaggacagagccccaattccaggcagggcaatggggtcgccttgtgaactaagatgcagatggagaagagcagacacagacacaggtcttggggcccctgcaggggtttctcactggctttttccccctggattcctatgggttctggggaacagagttaggtcggctggcaagacagatgcatgaggctgtggcgcccttgacattgagccggagggccagagttcgtcattgctgacgcagagaagctgggagccaaggttagccagatggtttggaggagttttaaacaatcttttcttttctttctctttccatctgtctgtccttctttcctcccttcctgccccctttcttttctcctttctttccttcctctctccttcctccctttttttctttttttttggttttctttttgtattagtattattattttttagacagggtcttgctctgttgcccaggctggagggcagtggcacgatcacagctcagtacaccctcaaccttctgggttcaagcaatcctcctgccttggcctcccaggtagctgggactacaggcgtgtgccaccacacctggttaattttttttttttttgagacggagtcttgctctgtcacccaggctgcagtgcagtggcgtgatctcggctcactgcaacctccacctcccgggttcaagcgatcctcctgcctcagcctcccgagtagctgggattacacgcgcccgccaccaagcccggctaatttttttatttttagtagagacagagtttcaccacgttggccaggctcgtctcaaactcctgacttagtgatctacccaccttggcctctcaaagtgctgggattagaggcgtgagccaccatgcgcagccaatttttgtatttttagtagagatggggtttcaccatgttggtcagtctggtctcgaactcctgacctcaagtgatccacctgcctcagcctcccaaagtgctggaattacaggcatgagccaccgcgcccagccctcttaaccatttttaagtgcacagttcagcagcattaagcacattcacattgttgtgcaaccatcagcccccgtccatctccagctttctctttttttttgtttgttttgagacagggtcttactctctcgcccagtatagagtgcagtggtgcggtcttggctcgctgcaacctctgccttccaggttcaagctattctcctgcctcagtctccccagtagctgggattacagacacacatcaccacgccctgctaattattttgcatttttagtagagatggtgtttcaccatattggccaggctgatcttgaactcctggcctcaagtggtctgctccaaactgctgagattacagccgtgagccactgctcccagccatctgcacctttctcatcttcccaaatgtaactatgtccccgtgaaacactcactccccattccacctccccagcccctggcaccccccattttattctggtgctaggggaatttcaaaccaggcaagtctcaacacatgctcgagtgtaagaaccagcccacagcctcgttccctaatcacggtcaaaccagaattctactccaggttctactctgtgaatctgctttctgtgaatctgttactctggggaccgcctataagttgaatcctacagtgtctccacttcagtgactggcttatttcacttttctcctctttatttatgagacaaaatttcgctcttgttgctcaggctggaatgcaatggcgtgatctcggctaatttttttgtatttttagtagaggcggggtttcaccatgttggccaggctggtctcgaactcctgacctcagacgatccactttggccttccaaagtgctgggattacaggcgcggcccacctttctcctcttaatcacacaggtaatccatacatacgacattcttttttttttttgacacggagtcttactctgtcacctaggctggagtgcagtggcgcaatcttggctcactgcaacctctgcctcccaggatcaagcaattctcctgcctcagcctcctgagtagctgggattacaggtaaccatcaccacacctggctaaattttgtatttttagtagagacggggtttcaccacgttggccacgctggtattgaactcctggcttcaagtgatcttcctgtctcggtctcccgaagtgctgggattacaggaatgagccactgtgcccggccaatacgacatctgtgcaatgaagtgcaacatataagacacccttcccccacccactgcccccaccaccgcccccacgcccccacccccatctccagatcagaacctggggctgtgcaattttaaacgttgtagccacttgctacttgggtagttgaagttcagtctcagccaggttggagtcctggactctggcccctcttttatttttattttttatttttttttgagacagagtctcgctctgtcgcccagactggagcgcagtggtgcgatctcggctcactgcaagctctgcctcctgagttcacgccattcccccgcctcagcctcccgagcagctgggactacaggcgcccgccaccacacccggctaatttcttgtattttttagtagagatggggtttcaccctgttagccaggatggtctagatttcctgaccttatgatccgcctgcctcgggcctcccaaagtgctgggatgacaggagtgagccaccgcgcccggcctctttttttttttttagacagtctctgtcacccaggctagagtgcgatggtgcgatctcggctcactgcaacctccaccttccgggttcaagcgattctcctgcctcagcctcctgagtatctgggattacaggtgcctgtgaccacgcccggctgatttttgtatttttagtagagacggggtttcaccacattggtcaggctagcctcaaactcctgaccccgtgatccttccgcctcagcctcccaaagtgctgggattacaggactctggcccatcttggctgctgccaatgtccttccttctatcttggtttttccacagttacgcacatgccagataacggcgagtctgttccccagcaactgcaacggatctgcccaccactgggaaatggaagaccttgcagcccaggtctttgtagaccaagattagattgtggtcaacaaacacctgaccttggcctttggaaccatcagccatgtcagctaaaataaaagcagaatctggctgggcgcagtggctcacgcctgtaatcccagcactttggggggctgaggtgggcagaccacctgaggtccggcgttctagaccagcctgaccaatatgatgaaaccccgtctctactaaacatacaaaaattagctgggcatggtggcgggcacctgtaatcccagctactcgggaggctgaggaaggagaattgcttgaaccctggaggcagaggttgcagtgagccgagattgcgccactgcactccaacctggactgcagaacaagactctgtcccaaaagcagataaataaaaataaataaaaataaaaatatggccgggcatggtggctcacacctgtaatcccaacactgggaagatgaggcgggcagatcacgaggtcagggattcgagaccagcctggccaacatggtgaaaccccgtctctactaaaaatacaaaaattagccgggcatgatgctgcatgcctgtaatcccagctactctggaggctgaggcaggagaatcgcttcatcccgggaggtggagcttgcagtgagctgagatcgcgccactgcactctagcctgggcaaaagagtgagactccatcgcaagaaaaaaaaaaaaaaaagctgcaagctctgtctcccgggttcaagtgattctcctgcctcagccttccaagtagctaggattatacgcgcccgccaccatgcctggctaatttttgtatttttagtagagatgcggtttcaccatgttggccaggctggtctcaaactcctgacctcacgtgatccacctgcctcggcctcccagagtgctgggattacaggtgtgaacccctgcgcctggccaagaaaagttgcttgaatgaagagtaaatagaagacccagaaagaaatgattcgtccgaggaaggtcacagaagcaacgtaatcaagatggaaatctgactcttcctaattttggccagacttcccatccctccaaagctttccagactcttccagatcattctagatatttccagaaatcattcgtgaaatctaactaggagtagtctgtaaacaatgtgtttcacacagatacaattcataaacgatgagaagacaaggacacttcatgaatgaaatttttacggccgggtatgttggctcacgcctataatcccaggactttggaagacccaggcaggaggattgcttgagtccaggagttcaagaccagtctgggccacatagtgagaccctgtcgctacaaaaaatttaaaaattaggtagatatggtggtgtatgcctctagttttagcttttttggaggctgaagcaggaggatctcttgagcccaggaggttgagctgcaatgagctacgattgaactactacactccagtctgggtgacagagaaagaggctgcctcaaaaaaataaaaataaaaaaataaggccggacgcggtggctcacgcctgtaatcccagcactttgggaggctggggtgggcagaccacgaggtcaggagatcgaggccatcctggccaacatgatgaaaccctgtctctactgaaaacacaaaaattagctgggcgtggtggcgtatacctgtaatcccagctactcgggaggctgaggcaggagaatcacttgaaccagggagtcagaggttgcagcgagaggagattgtgccactgcattccagcctggcaacagagcaagactccgtctcaaaaaagaaacaacaacagcaacaacaacaaaaaaaacataaaaaagttcgggcacggtggctcacacctgtaatcccagcactttgggaggccaaggtgggtagatctcttgaggtcaggagttcaagaccagcctggccaacaaacatggtgaaaccccgtctctactaaaaatacaaaaagtagccgggtgtagtcccagctactcggaaggctgaggcaggagaatcgcttcaacctgggagatggaagttgcagtgaactgagattgcgccactgggtgacagagtaagactcttgtctcaaaaaaaaaaaaagaaagaaagtttaatttaatgattcaaataatgacctgctcgagagataaatataaagtctaacgtaagaggtgtatactttttcctctgtcctgctgtcctcgccccacctcaccccaagtcccaacctgattgatcagtctcctttccctctggtagccccactcccatgaccgaaccgagaagtcatgcacccgcataagaactctaattttttttttcaaagtcttctcactgccccaaaaatagtttctttcattcccaggggatgtgaaagtgtctctcccaattttatttcaacctcccagcgttccacacatatgccttgcctcagccagctttcactgatctgccatttccacctcggcgctgctcctacctgcggaaatcctgtccatccatagtctgatttctgttgttccagaacattcttttttttttcccctggaacattctttaagatacctcaataaatgaaaccagagggtatagagcagtatgaatgggtactacaatgtacagggggaaatggaggggaatatgatatactctcctccttgtatatgcttagaatgttctagaaggatatgcttaaaaggttagcagtcctggccaggcgtggtggctcacgcctgtaatctcagcactttgggatgccaacgcggacggatcacaaggtcaggagttctagatcagcctgaccaatatagtgaaacctcatctttactaaaaatacaaaaattagccgggtacggtggcatgtgcctgtagtcccagctactttggaacctgaggcaggagaatcgcttgaactcgggaggcagaggttgcagtgagccgagactgtgccattgcactgcagcctgggtgacagaacaggactccgtctcaaaaaaaaacaaaaaaggtcagcagtcttaattgtcagagggcaggggacctgcatgggatggaggtttttccatgtgtccaccttttgagcccttttgctttttttttttaaatctttttattgtagcaaaatagatataaaatttaccctttttttttttgagacagggtctcactctgttgcccaggttggagtgcagtggcatgatcttggctcactgcagcctctgcctcctgggttcaagcgattttcctgcctcagcctcccgagtagctgggattacaggtgcttgccaccatacccggctaattttgtatttttagtagagacggggttacgccaagttggccaagctggtcgcaaactcctgacctcaagtgatccgcccccctcggcctcccaaagtgctgggattacaggcaggagccaccacgctcagccctaaaatttaccatattaaccattttcaagttcagaggcattaaagtatactcacattgttgttcaactgtcaccactactcacctgcagaagtttttcatcttgcaaagtgaaaaccccatacccaatttcccgttcttcctctcagcccctggtaatcactattctactttttgtctactttttgtatgaatttgcctattctaggacctaatagaagtggagtcaaacctgtttgtccttttgtggctggcttatttcacccggccttatatcctcaaggtttatccatgttggaggatgcctgaatttccttgtttttaaggctaaattttattctattatattaatatgtcatattttgtttatcctgatggacacttgggttgattccacctttggccattttgaagaagcttctatgtacatggtatacacatatatctttgggtctctgctttcaatgcttttggggatatttcagatgtggaatttctggattataaggcaatttttttttttgagacagactctcgctcttgtcgcccaggctagaatgtggtggtgtgatctattttttttttttttttgagatggagtctcgctctgtcgcccaggctggagtgcagtgtcacgatctcagctcactgcaagctccgcctcccaggttcgtgccattcttatgcctcagcctcccaagtagctgggaccacagccgcccaccacctcacccggctaatttttgtatttttagtagagacagggtttcactatgttggccaggatggtctcgatctcctgacctcgtgatccgcctgcctcggcctcccaaagtgctgggattacaggcgtgagccactgcacccggctggtgtgatcttggctcgctgcaacctctgcctcccaggttcaagcgattcttgtgcctcagcctctccgcagctgggactacaggtgtgcgccactgtgcccagctactttttaaaaatatatgtgtatttattatacttttaagttctgggatacatgtacagaacgtgcaggtttgttacataggtatacatgtgccatggtggtttgctgcacccatcaaccggtcatctacattaggtatttctcctaatgctatcccttccctagccctccactctcccggttttttgttttgttttgttttgttgttttgtttttagtagagacagggtctcaccatgttgcccaggctagtcttgaactcctgacctcaagtgatccgcccacctcagcctcccaaagtgctgggattacaggtgtgacccactacactcggccttattttcacttatttatgcaattttcactattgctatattctaggaggcactgtggaattgcactgtggaattttagtattgctgtatttcagcaagccatgaggtctgtcagcacacggctttgggcattttgtgaagataactgatgccagctgagccaaggcaggttcctgattccacccactggcaggcaccgaggtctctgctgttactgatggtttctctgtggattgatgggcttaaggccagaccacagctgcaatggctcacctctgccaaaggccaggctcgttggggcagagacctattccggactgagcctcctggtgaattagagaggtagaaaatgggaggacgggggcaggtgggctattacagcgaggaaaatgcccaccctgagttgtattagataactttgggagttcaggaactttccaataaagtgggttccacagcaggattacttactgactccctaatagaaagaaggcaggcacaggccgggcgtgttggctcatgtctgtaatcccagcacgttgggaggctgaggcgggtggatcacaaggtcaggagatccagaccatcctggctaacaaagtgaaaccccgtctctactaaaaatacaaaaaattaggctgggcgtggtggctcgtgcctgtaatcccagcactttgggaggctgaggcgggcggatcacgaggtcaggagatcgagaccgtcctggctaacacggtaaaaccccatctctactaaacatacaaaaaaaaattagccaggtgtggtggcgggcgcctgtagtcccagctactcaggaggctgaggcaggagagtggtgtgaactcgggaggcgcagcttgcagtgagccgagactgcgccactgcactccagcctgggcaacagacagagactccgtctcaaaaaaaaaaaaaaaaaatacaaaaaattagccaggcgtggtggcacgtgcacgtgactgtagtcccagctacttgggaggctgaggcaggagaattgtttgaacccgggagacggaggttgcagtgagccgagatcgcgccactgcactccagcctgggtgacagagctagactccgtcaaaaaacaaaaaacaaaaaacaaaaaaacaaaaaaaaaaaaacagcaggaactggcaggtcttccctgaagagataaaaaaaaaaaaatgcagttgcaacacaaaagcagccacagagaaaagcaaacccatatatggtatttattatgcaccgagtgtggctctaatcacttttttttttttaattgagagacagcctggctctgttgattgggctggagtgcagtggcgcgaccgtagctcattgcagcctcaacctccttggctcaagcaatcctcctacctcagcctcctgagtagctgggaccacaggtgtgagccaccacgcctggctaattgttttttttttttttgtagagacagggtctcactatgtggcccaggctggtttccaactcctgggctcaagtgatcctcccacctctgcctcccaaagtgctggggattacaggcatgagccacctcgcctggcctctagtcgctttatatattttaacttaatccttacaagagccctgtgagctagttacaggagcacaaatggaaaccaagaaacagaaaaatttatcagcatgactcagtcctcagagccatgtatggccgtgtccgtgcatggcaggcaggtcaggggcctggggaacgctgttctggaaaccttggccaggccttggcacccgaggaatgtgcttttcagagtttttgtggctcttttccagacctgccctgacctctagctctgggaactatgtaagccaagtgccttccgggaagggagtccctctcctggtaactctttctgggtaaccagatgtggactcatgacacacactgagcctacgtcttataattttttgtttttgtttttgagacagtttcggtcttcttgcccaggctggagtgcaatggtgcgatctcggctcactgcaacctctgcctcccaggttcaagcgattctcctgcctcagcctccctagtagctggaattgcaggcatgcgccaccacgcctggctaattttttgtatttttttttttttagtagaaacggggtttcaccttgttagccaggctggtcaccaactcctgacctcaggtgatccgcccacctctgcctcccaaagtgctgggattacaggtgtgagacagctgtgagccaccacgcccggcgcattttttttttcttttttttcagagggagtgtccctctgtcacccaggctgaagtgtagtggcgtgatctcggcccactgtaacctctatctcccaggttcaagtgattctcctgactcagcctcccaagtagctgggactacaggcgcctgctaccatgcctggctaatttttgtagttttagtagaaaccgggttttgccatgttggccaggctggtctcaaactcttgacttcaggtgatccacctgccttggccttctgaagtgctgggattatagggcatgagccactgtgactggccatcttaaattttttttttttttttttttttttttgagacagggtttcactctgtcgcccaggctggagtgcaaaggcgcgatcttggttcactgcaagctccgcctcctgggttcatgccattctcctgcctctgcctcatgagtaactgagactacaggcgcccaccaccacgcccggctaatttttttgtatttttttagtagagatggggtttcaccttgttagccaggatggtctcgatctcctgacctcgtgatccacccgtctcggcctcccaaaatgctggcattacaggcgtgagccaccgcacccagccttaaatttttttttaagggaaatcaaacccagtgatattgggccagtacagtggctcacacctgtaattccaccactttgggaggctgaggcaggtgaatcacctgaggtcaggagttcgagaccagcccggcaaacatggcgaaaccccgtctctactaaaaataagaaaattagccgggcgtagtggcatgcacctgtaatctcagctactcgggaagctgaggcatgagaatcgcttgaacctgggagcaggatgttgcagtgaaccgatatcacaccactgcactccagcctgggtgacagagcaagactctgtctcaaaaaaaaaaagaaaaaaaaatccagtgatacttactttttaaatttttatttacttattttttgctttaagttgaatctttaaacttatctttatttttgagacacagtctcactctgtcgcccaggctggagtgcagtggtacaaccacagctcagtgcagcgttgacctcctgggctcaagccatcctcccgcctcagcctcccgagtagctgggactacaggcgcacacaaccatgtccagcttatttttgtattttttgtagagacagggtcccactgtgttgccctggcttgttctgaactcctaggctcaagtgatccccccgcctcaccctcccaaagtgctgggattacaggcatgagccaccacatccagacttcacttttttgtttaatgtcgcaaatggcataaggaatgggattcaatggggacacatttataaacgttgcagcagctcctagaacttgcctatccttgtaaacttctctaggtgattgctaattacttctttttttttttttttttttgagacggagtctcactctgtcgcccaggctggagtacagtggcgcaatctcgtctcactgcaaactccacctcccgggttcacgccattctcctgcctcagcctcccgagtagctgggactacaggcacccgccaccacgcccggctaattttttgtatttttttttagtagaggtggggtttcactgtgttatccaggatggtcttgatctcctgacctcgtgatccacctgcctcagcctcccaaagtgctgggattacaggcgtgagccaccatgcccagcccgctaattatttcaatttgaccttgacactgagcctgccaagtaggttcaagcattttgatggcccctttacaggttgggaaagctaatttatctgtccaaggccgaattctgaaactgagtcttaactgccaaaaattcttatcatcaatttcttcttctgggttgggcacagtggctcatgcctgtaaagccagcaatttgagaggcatcatgatgcaagaggaagaggattgagtgaagctaggagtttgggaccagcctgggcaacatagtgagaccccatctataaaaaaaaattaaaaattagttgggcatggtggtgcactcctgtggtcctagctattcaggaggctgaggtgggaggattccttgagcccagggttgacgctgcagagagctgtgatcacgccactgcagtccagcctgagtgacagctggaaataatgataaataaataataaataattatttaaaaaattataataaaaataattaaaaaattattttccctgattaatctttttttttgtccttctgagagttcaatttgtcccttttctgcctggtctcctaggtttccctaaaatcctgctgagaggttagcactgcctgccaaagtcagtttgcaaaatcccagagaaatccagcttattcctgggggaaccgccaagactgcccagccctgtgtggggttcaggcaagtttctcacatgtgcctttttggcaagaggcctctggcaaccccatgagtccccaaagagactcaattctaaaagttggtctccaccagctctctgtggcttaggggttcaagttcaactgtgaaagccctgttttgttttgattttgctttgagggagaggaaaccgcccttctgtttgttcaactccttctcctaaggggagaaatcaatatttacgtccagactccaggtatccgtacaattgatttttcagatgtttatactcagccaaaggcgggatcccacaaaacaaaaaatatttttttggctgtacttttgtgaagattttatttaaattcctgattgatcagtgtctattaggtgatttggaataacaatgtaaaaacaatatacaacgaaaggaagctaaaaatctatacacaattcctagaaaggaaaaggcaaatatagaaagtggcggaagttcccaacatttttagtgttttccttttgaggcagagaggacaatggcattaggctattggaggatcttgaaaggctgttgttatccttctgtggacaacaacagcaaaatgttaacagttaaacatcgagaaatttcaggaggatctttcagaagatgcgtttccaattttgagggggcgtcagctcttcaccggagacccaaatacaacaaatcaagtcgcctgccctggcgacactttcgaaggactggagtgggaatcagagcttcacgggttaaaaagccgatgtcacatcggccgttcgaaactcctcctcttgcagtgaggtgaagacatttgaaaatcaccccactgcaaactcctccccctgctagaaacctcacattgaaatgctgtaaatgacgtgggccccgagtgcaatcgcgggaagccagggtttccagctaggacacagcaggtcgtgatccgggtcgggacactgcctggcagaggctgcgagcatggggccctggggctggaaattgcgctggaccgtcgccttgctcctcgccgcggcggggactgcaggtaaggcttgctccaggcgccagaataggttgagagggagcccccggggggcccttgggaatttatttttttgggtacaaataatcactccatccctgggagacttgtggggtaatggcacggggtccttcccaaacggctggagggggcgctggaggggggcgctgaggggagcgcgagggtcgggaggagtctgagggatttaagggaaacggggcaccgctgtcccccaagtctccacagggtgagggaccgcatcttctttgagacggagtctagctctgtcgcccaggatggagtgcagtggcacgatctcagctcactgcaacctccgcctcccgggtttaagcgagtctcctctctcagcctcccgaatagctgggattacaggcgcccaaccaccacgcccgcctaatttttgtatttttagtagagacgggttttcaccattttggccaggctggtctcgaaccccgacctcaggtgatctgcccaaaagtgctgggattacaggcgtcagccaccgcgcccggccgggaccctctcttctaactcggagctgggtgtggggacctccagtcctaaaacaagggatcactcccacccccgccttaagtccttctgggggcgagggcgactggagacccggatgtccagcctggaggtcaccgcgggctcaggggtcccgatccgctttgcgcgaccccagggcgccactgccatcctgagttgggtgcagtcccgggattccgccgcgtgctccgggacgggggccaccccctcccgcccctgcccccgcccctttggcccgccccccgaattccattgggtgtagtccaacaggccaccctcgagccactccccttgtccaatgtgaggcggtggaggcggaggcgggcgtcgggaggacggggcttgtgtacgagcggggcggggctggcgcggaagtctgagcctcaccttgtccggggcgaggcggatgcaggggaggcctggcgttcctccgcggttcctgtcacaaaggcgacgacaagtcccgggtccccggagccgcctccgcgacatacacgagtcgccctccgttatcctgggccctcctggcgaagtccccggtttccgctgtgctctgtggcgacacctccgtccccaccttgtcctggggggcgccctcgccccaccagccccgatcaagttcacagaggggcccccggccaccctcaaggcctcggttccttacgaggttgaaacgttgcctcagaatctccccgcccctccttggtctgcagccgagatcttcagccacggtggggcagctatcccccgggaccgaccccctggggtggcctcgcttcttcagaggctgtgaatggcttcggttcagctgtccaagcggcgatttttcctctgggtgaaatggattagattttagatttccacaagaggctggttagtgcatgatcctgagttagagctttttaggtggctttaaattagttgcagagagacagcctcgccctagacaacagctacatggccctttccctcctgagaaccagcctagcctagaaaaggattgggattgcctgatgaacacaaggattgcaggaaactttttttttaattggcaagggggttggctttgactggatggagagctttgaactgccttgaaattcacgctgtaactaacacaccagtttcctctgggaggccagagagggagggagggtgtaatgaaatacggatgattgttcttttatttttatttacttatttattttttaactttttgtagagatgaggtctcgcttggttgctcaggctggtcttgaactcctggcctcaagcgatcctcctacctcagcctcccaaagtgttgggattacaggagtgagccaccgcgccccaccggggatgatgatgattgcaaacattctgccactcagttttacaaaagaaagagaggcactggattaatgtgtatctcactcaccaatcaacctcttccttaagagaaaatgttaaggaagtcttaggcaaggccttgtttgttcatcactttagtttctctctcccgggatggctgagaatgtgatgtttcctctgttgtcaaggagactacacccctgatgttttcctccagacttctgagagctggtgtgtgtttctagcactttctagctgcaccacctcacgctgtagctggcttcaaggcatatccaggggggagtttcttgtccatttcctttacaaagggaagttgttggaatctgaaccgcaagccttcacttagaccaaaatcaggcaacagcggtgagcgcagctccaaacgtgtcaatgactcacccaaatttgagtaagggagttggctgctttaacgagccgcagggtgattcccttgtcatttccggaaatacctatcttccagggaacactgggaaaaaacagggagacctttgttgagacagaaaacctgtaggggaattctgttcctcattcctgctcttatctgtagacttcctccctgataagatccaattctagatgggtcggttgctccttgctttgatgggtgctttgatgggctttattattattattattattattattattattttgatgggctttttgatgtcccttttccttccacactctgtcccaactgtcaagcaaatagccttttgttgctaagagactgcagatgtaaccgaccagcagcaaacagtgagtcaggctctctcttccggaagcaaaatcaattgctgagatcactctggggaaaatacccaccttatttggaaagaagcactgatcaattgatgtctattttttttttttttgagttggagtctcgccctgtcacccaggctggagtgcaatggcataatctcgcctcactgcaatccccgcctcccgggttccagcaattctcctgcctcagcctcctgagtagctggaattataggcgcctgccacaacacccggctaatttttgtatttgtagtagagatggggtttcaccacgttggccaggctggtctcgaactcctgacctcgtgatccacccgcctcagcctcccaaagtccaaggattgcaggcgtgacccactgtgccagccaatcaattgatttctcattcattttcagctggctctgttcccttaagccaggggattttcgtttgtttgtttccccttcaaggaaatgattctagctacagttttgatttccttgtacaactgttttcagtagcacagggaaagaaaacatcgaaagcattcaccacctcatttgtgtgctgggggaaaaagcagaaatgtgtattctctttttttgtttcgatgaccttgttcctgacttgttactcgtgacttgagagatcagagggctagaggactagaatttatagaggtgttttttttgtttgtttatttttgttcgagttgcccaggctggagtgcagtggcgcaatctcggctcactgcaacctctgcctcccaggttcaagcgattcttcggcctcagcctcctgagtagctggaactacaggcgcccgccaccacacccagctaatttttgtatttttcagtagagatgggatttcaccatattggtcaagctggcctcgaactcctgacctcgtgatccacccgcctcagtttcccaaagtgctgggagtacaggcgtgagccgccgtgcccggcctttttgtgtttttgtgtttttgagaggagctcattgctttttaggcttccctagcgtgagaaaatctggggatccatgctctagtttacttcctttttttttttttttttgagatggagtctcgcttagattgcctaatctcagctcattgcaacttctgcctccggggttcaagggattctcgtgtctcagcctcctgggtagctaggatacgggcacccgctaccatgcctggctaattttgtacttttagtagagacagggtttcgccacgttggccaggctggtctcgaactcctgacctcaggtgagccgcctgccttggcctcccaaagtgctgagattacaggcgtgagccaccgcgcttggcctaatttgcttttcctgaaattcaaatggtctaatatgaaaaacgccaaccttgcttgaaagaataagaaagaggtgcggtttcgttgggccgttgatgtttggaacaggactggttttgtccccttgctcggaaagggcagcaactgtgaggacagctccctgacgtgctctcactcagcactgttccgttcctgagcactgtccccactagctaggccaagggagctcatttggcaggcaactgctgtctggctgcgcctgtggcagtaaaatctgcctttattttttggaggcagggtcttgccctgtcgctcaggctgaagtgtgcagttatagctcactgcagcctccagcttctgtactcaactgatcctcctctctcagcctcctgagtagctgggactatacgcacgtgttaccactcccacctcagtttgtttgtttatttatttatttatttatttattgagatggagttttgctcttgctgcccaggctggagtgcaatggcgcgatctcggctcaccgcaacctccacctcctggttcaagcgattctcctgcctcagcctcctgagtagctgggattacaggcatgcaccaccacgcccggctaattttgtatttttcgtagagatggggtttctccacattggttcaggctgttctcgaactcccaacctcaggtgatccacccgcctcagcctcccaaagtgctgggattataggcgtgagcccccgaacccggccactcccagctaagtttaaattttttgtttgtttgttcgtttgtttttattttttgagacagagtctcccgcccaggctggagcgcagatcactgcatccttgacctcccaggcttaagccatcctccccactcagcctcccaagtagctgggattacaggtgtgtgccactatgcttggctaagttgtgtattttttgtagagatggggttcaagggattctcgctttgttgcctcggttggtctcaaactcctgggctcaagcagtcctccctcctcagcctcccaaggtgctggggaaatccacttttgaaacattgtctggagagttgcccaggtggtagatcacagaaataggtcatcgtggggtccttcccatgggtgcagtcttgagccacctgtggccagcaaatatttggagaataatagtcaggggagagcttgaggtccagggaaaggttttgtttttcttcagggaaaggtttttattgttctttatccctccttaaaggaccttcaggtgttactgacattcccggtctacccagtggcacatttagtttgtaagctgggccctcgtacagaggtagggaggtgagagcattggattagtggtcaccaaagctgcggtcacctagtggggtgatcagaggctcctcccttaagatcttgattgccaacgcctctggcccaactttcctttttatttatcgcaagcctcctggaatctcaattgctttttgcccacccggtgtgtcagcacaagaaatgagtcatttcctcctttaagcacagttgaaattgagctgtgagtcagtgaggtgtgtacgatattgtcaaagcggggtgtgtacagtattgacagatctgtagttgggcaagagaattatcagagtttgtgaccacagcagattccaaagctcgactcattttcttctctcttccttcccttttttcttttctttttttttttttttttgacagagtctcgctctgttgcccaggctggagtgcagtggcacaatctgggctcactgcagcccctgcctcctgggttcaaatgattctcatgtttcagcctcccgagtagctgcaattacaggcattcgggttcaagtgattctcctgcctcagccacctgagcagctgggattacaggcgcccgccaccacgcccggctaatttttgtatttttagtagagacggggtttcaccatgttggccaggctggtctcgaactcctgaactcaggtgatccgcccacttcggcctcccaaagtgctgagattacagacgtgagtcaccgcgcccagcctgttctgttctttaattctcaaaacaccctctaggaagtagagactgccattctcccccattttacagatcaggaaactgagtcccagaaggatttagtcagttacccaagttgttctagttaaatggcctggaaagccagtgaagcccaggattgtctatctaacccccttactactctaactttcagggaatccacatgaatgtgctgggtcaaccatcaaagttgaaatggataaagggggctggatgcggtggctgatgcctgtaatcctagcactttgggaggccgagatgggtgggtggattgcttgagcccaagagtttgagaccagcctgggcaacatagtgagacacctgtctctgcaaaaaataaataaaaagttagctgagtgtgatggtgcacccctctagtcacagctgttgagttaggcttaggcaggaggatcgcatgaacctgggaggtggaggcggccgtgagcctcagtcatgccactgcactccaacctgggcaacagagtgaaagccggtgtccgaaagagaaagaaaaaaagacatagatacatcttttaaagttaggttgtatgttaattacctacaactcagtttcaactgtgcttaaaggaggaaatgactcatttcttgctacatatcaaattagcccaaaatgtagtggcttaaaacaacacatttatgatttctcagtttttgcgtgtcaggaatttggaagcagcacagctagacggttccagctcagggtctctcatgaagttgcaatcaaaatattggcaggagagaaaaacatattttcagaagctgcaggcataggaagacttggctggggttgaaggatccacttccaagatggcgcactcagtggctcttggctggaggcctcagttccctgctgcgtggagctctccctccagctgcttgagtggactcatgacatgcagctggcctcccctggagcagtcgatccaacaatgagcatggccatgaactaggctcagaagccactccctgtcgtctctacattttcctatcagaagcaagtcattaaaagtccagtgccactccaggggagacgaattaggctctgccttctgaaaggattatcacagaagatgcggtcctatattctttttttaaaattattcttttttttattttgtagagatggggtcttggtatgttgcctaggccagtctggaattcctgggctcaaacaatcctgtctctgcctcccaaagtgttgggattacaggcatgagccactgcacctggtcatgtggtcatattttctttttcttttttttttttttttgagacagagtctctgtcgcccaggctggagtatggtggcgtgatctcagttcactgcagcctccgcctcccgggttcaagcgattctcctgcctcagcctcctgagtagctgggattacaggcgcccgccaacatgcccagctaatttttttagtagagatggggtttcaccatgttagccaggatggtctcgatctcctgatttggtgatccgcccaccttggcctcccaaagtttcaaccatcgatcagaacttattgatgtacttatgtagctaggcacggtggcgcgtgcctgtaatcccagctacttggaagggttaaggcaggagaatcgcttgaacctgggaggcagaggttacagtgagtcaagatcataccattgcactccagtctgggcaacagaatgagactctgtctcaaaaacaaaaaacaaacccttgtatgtgattttcctggatagcatctgttacatcttcacaaagataaaaagtcagacttggctgggcatggtggctcacacctgtaatcccagcactgagaggctgaggcaggcagatcacttgaggtcaggaatttgagaccaggctgggcagcatggtgaaaccccgtctctacaaaaaatacaaaaattagccgggtgtggtgtcacgcacctgtattcccaagctactcaggaagctaaggcaggagaatcacttgaacccagaggtggaggtttgcagtgagttgagattgtgccattgcactccagcctgggcgacagagtgagactctgtgtcaaaaataaaataaaataaaattttaaaaaaggcagatttttttttcttcttggtattgttaccttattatagtaataataagtgcatagtgcatgctgagataagcaatcataatttgttattgcggccgggcatggtggctccagcctataatcccagcactttggtcaggagttcaaggccagcctggccaatatagtgaaactccatctctactaaaatacaagaaattacctgggcatggtggcagttgctggtgatccccagctacttgggaggctgaggcaggagaatcgcttgaacctgggaagcagaggttgcagtgagccaagattgcaccactgcactccagcctgggtgacagagtgagactctgtctgaaaataataataataataatttgttattgcttttattgccttagtttacatagggaatcaaagtttatactttgatttataaaagttgctttgattctagttcacagaaccagaatctttcatataaaggtattagagggcccagtgtggtggctcatgcctgtaatcccagcatattgggaggctgaggagggaggatcactttaggagtttgaggccagcctaggcaacatagtgagaccttgtctctacaaaaaattccaacattagctgggcatggtggcatgtgcctgtagtcccatttatttggggggctgaggcaggaggatcacttgagcccacgaggttcaatccaggttgcagtaagccatgatcctgccactgcactccagtttgggtaacagagcgaagctatgtctcaaaaaaagaaaaaaaaagtattctaaatccaaatttaatatataaaactaaatgcaggccaagtgtggtggcatatacctataatcacaacactttgggaggctgaggtgggaggattgcttgagcccaagagttcaagaccagcctaggtaacacagtaagaccccatctctacaaaaagtagaaaaattagcctggcatggtggtgagtgcttttaatcccaactacttagggggctgagatgggaagattgcttgagcctcagagtttgaggctgcagtgggccgtgatcgctccactgatcgctctaaagtgagaccctgtctcaaaaaaaaagaaaatagaagaaaactaaatacattcaataagactttgatctcttttccaaggtgtaaatatattttgggaaattttccagttactttgttctcattttaatgtaataatctaagtcttggttttctaaggaaaagttttctcttattatatcttttgttaatgtttctctcccatttcttttgatctgatcttcagatacatgattatcttcactgctaaatttgtgttctctggcctctacatttataatttctcataattctttatctaagtatttcttccctacctactgaagaaaactcaagttttcttccaccttaatgattatgctgtgtctgtgagttttcttcatgactctttacagtacaagttttttgtttttgtttttttaatggtcagatggatagaacaacacaggttttgtttgttttgttttaacttttaaaaaaattataatagataaagggtctcactacgttgtccaggctgatctcatactcctgggctcaagcaatccacccacctctgcctcccaaagtgctgggattacagtcatgagccaacatgcctgggcagtacaggttttttttgagacggagttttgttcttgttgccgaggctggagtgcaatggcacaatcttggctcaccacaaagtctgcctcccaggttcaagtgattctcctgcctcagcctcctgagtagctgggattacaggcatgtgccaccacgcccagctaattttgtatttttagtagagacggggtttcaccatgttggccaggctggtttcgaactgctgacctcaggtgatctgcccacctcggcctcccaaagtgctgggattacaggcatgagccaccatgcccagctgtagtacaggttttaatatgctaaatactcttcctttctttattaatgtgcatggaagttctaatatttttttcccataccccagagagtccatattttggaatcaacaacactagcctttgttgacaagtgtctctcttgggttccttctttgtgtcctccactgaattttggggttcataaaatttcatttgttgtgcttgcttaattccctgggaatcagactgttcctgatcggatgacatttctggttaattctttagttggcaggaaatagacacaggaaacgtggtcagtttctgattctggcgttgagagaccctttctccttttcctctctctcagtgggcgacagatgcgaaagaaacgagttccagtgccaagacgggaaatgcatctcctacaagtgggtctgcgatggcagcgctgagtgccaggatggctctgatgagtcccaggagacgtgctgtgagtcccctttgggcatgatatgcatttatttttgtaatagagacagggtctcgccatgttggccaggctggtcttgaatttctggtctcaagtgatccgctggcctcggcctcccaaagtgctgggattacaggcaccacgcctggcctgtgacacgattcttaacccctttttgatgatggcggctggaaaagtggccagtggattttgatgtattcaatcatgaattaggaggtggggagagaatgaattattggagctttccttaaagccattaaatggctctattgttttttcaattgatgtgaatttcacataacatgaaattaaccagctcagtggcattaatacatctgcaatgctgtgtggccaccacctctatcttgttccaaaactttgcataacctaatgtctttttttttttttttttttgagacggagtctcgttccatcacccaggctggagtgcagtggtgtgatctcagctcactgcaacctccgcctcccaggttcacgccatcctcctgcctcagcctcccgagtagctgggactacaggcaccctccaccacatccggctaattttttgtatctttagtagagatggggtttcaccatgttagccgggatggtctcgatctcctgacctcgtgatccacctgcctccgcctcccaaagtgctggcattacaggcgtgagccaccatgcccggcctatttttttttttaagagatggagtctaattctgttgcccaggctggagtccagtggtaccatcatacttcactgcagccttgacctcttgggctcaagtgattctcttgcctcgaactcccaaagtattgggattacaggtgtgagccaccgcactcagcctaatgtccagtttttaacaagctccatttaaatgccctccgttttgacccataaaggggtaggcttggccgggcacaatggcttgtgtctgtagtcccagctacttgggaggctgaggcagaaaggcagaaagattgctttataaagcccaggagtttgagggccacctgggtggcatagctagacctcatctctaaaaaataagtaataaataaatatttgtttttgtttttttctttttcttttcttttttttttttttttgagacggagtcttgctctgttgcccaggctggagtgcagtggcgcgatctcagctcactgcaagctgtgcctcctgggttcatgccattctcctgcctcagcctcccgagtagctgggactacaggcgcccactaccacgcccagctaattttttgtatttttagtagagatggggtttcaccacgttagccaggatggtctcaatctcctgacctcgtgatccgccagctttggcctcccaaagtgttgggattacaggcgtgagccactgagcccgccccatatgtatgtatatatatatttttttaaaatgggagaccaggcatggtggctcatgcctagaatcccagcactttgggaagctgaggtaggcggatcacttgaggccatgagtttgagaccagcctgctcaacatgatgaaacttctatctctactaaaaaaaaaagtgggattaggtcaggcacggtggctcacacctgtaatcccagcactttcagaggccgaggcaggaggatcatgaggtcaggagatcgagaccatcctggctaacacggtgaaaccccgtctctactaaaaaaatacaaaaaattagccaggcgtggtggcgggtgcctgtagtcccagctactcaggaggctgaggcaggagaatggcgtgaacccgggaggcggagcttgcagtgagccaagatcgtgccactgtactccagcctgggcgacagagcaagactctgtctcaaaaaaaaaaaaaaaagtgggattgacattctcttcaaagttctggggttttcctttgcaaagacaggattggcaaggccagtgggtcttttttgtgtgtgtgtgtgtgacggagtctcactctgccacccaggctggagtgcaatggcaggatctcggctcaccgcaacctcctcctcccaggttaaagtgattctcctgcctcagcctcccgagtagctgggactacaggtgcccgccaccacacccaactaatttttgtatttttagtagagacagggtttcactatattggccaggctggtcttgaacccctgacctcacgtgatccacccgccttggcctcccaaagtgctgggattacaggcgtgagccactgtgctcggcctcagtgggtctttcctttgagtgacagttcaatcctgtctcttctgtagtgtctgtcacctgcaaatccggggacttcagctgtgggggccgtgtcaaccgctgcattcctcagttctggaggtgcgatggccaagtggactgcgacaacggctcagacgagcaaggctgtcgtaagtgtggccctgcctttgctattgagcctatctgagtcctggggagtggtctgactttgtctctacggggtcctgctcgagctgcaaggcagctgccccgaactgggctccatctcttgggggctcataccaagcctcttccgcccttcaaatccccccttgaccaggaggcattacaaagtggggatggtgctacctcttcgggtttgtcacgcacagtcagggaggctgtccctgccgagggctagccacctggcacacacactggcaagccgctgtgattcccgctggtcgtgatccccgtgatcctgtgatccccgccccgtgaggctgaacacatagtgacgcttgctagccaagcctcaatgacccacgtaacatgaagggggaaaagccagaaagttctgccaaggagcaaggccaagaatcccgaagggaaatggactttgaagctgggcgtcttcttggctgtcttaatacaagtggcacatccaaatccaaaaccccgaaattcaaagtcttgagcacccgaaattctgaaacgtcttgagcactgacctttagaaggaaatgcttattggagcattttggatttcggatttttaccactgagtgtggagtcctaattaggaaaaaaaccaggctgaccgaaccaaaggaaagcaataaaagaaggcagatagggtcaggcacggtggctcacccctgtaatcccagccttttgagaggctgaggcgggtggatcacttgaggtcaggagttcgagagcagcctggccaacacggtgaaaccccatctctactgaaaatacaaaaactagccaggtatggtggcgtctgcctgtaatcccagctactcgggaggctgagacaggagaatcacttgaacctgggaggcagaggttgcagtgagccaatatcacgccattgcactccagcctgggggacaagagcgaaattctgtctcaaaaaaaaagaagaagaaggccgacaaactatgtaactctgcctttctccatggtccagaacacacagccctcctgcgtaaataactccttatcttcctgctcccagctatcatcagacacctcggctgatagaaaattgcaagttagctcactgcaacctcggcattataagtactgcacaaagccctcttcagcgcacagcacaagcaccattctataaaatctccagcaagcggccaggtgcagtggctcatacctgtaatcccagcattttgggagactgaggcgggcggatcacctgaggtcaggagtttgagaccagcctggccaacatggtgaaaccccgtctctattaaaaatacaaaaaaattagccaggcgtggtggcaggtgcctgtaatcccagctacttggaaggctgaggcaggagaatcgcttgaacccgggaggtggaagttgcagtgagccgagatcttgccatcgcactccagcctgggggacaagagtgagacttcgtctcaaaaaaaaaaaaaaaaattcccagcaagcctttgtcttctggcagtcagctcctctcttgctgacctgctcattgctttcttgcaaggtattttcctacctactttctggaataaatctgtctttctgtacttacaactaccttttttaaaatttctttcttttttgagatggagtctcactctgtttgcccaggctggagttcagtggtgcaatctcagctcactgcaacctctacctactgggttcaagcgattctcctgcctcagcttcccgagtagctgggattacaggcgtgcaccagcacgcaggctaatttttgtatttttagtagagacggggtttcaccatgttggccaaggtggtcttgaactcctgacctcaagtgatcctcccacctcagcctcccaaagcgctaggattacggccatgagccactgaggccggctgcacctacaactgtcttgataaattcttacccccacaccactggtccagatagtcagtgctcacccacaacattaaggatattccaaatttgaaacattccaaaatcagaaaaatattccaactctgaaaatattccaaaatccaaaaaaattcaaaatccaaaacacttctggtcccaagcattttagagaagggatactcaacccaaaataaggacagcaattctataaattgtgctaccatcttgcaggtctcagtttaacagctttacacctattagcgcaccagtgctcatagcagtgctgggaaatgtgtacagatgaggaaactgaggcaccgagagggcagtggttcagagtccatggcccctgactgctccccagcccgcctttccaggggcctggcctcactgcggcagcgtccccggctatagaatgggctggtgttgggagacttcacacggtgatggtggtctcggcccatccatccctgcagcccccaagacgtgctcccaggacgagtttcgctgccacgatgggaagtgcatctctcggcagttcgtctgtgactcagaccgggactgcttggacggctcagacgaggcctcctgcccggtgctcacctgtggtcccgccagcttccagtgcaacagctccacctgcatcccccagctgtgggcctgcgacaacgaccccgactgcgaagatggctcggatgagtggccgcagcgctgtaggggtctttacgtgttccaaggggacagtagcccctgctcggccttcgagttccactgcctaagtggcgagtgcatccactccagctggcgctgtgatggtggccccgactgcaaggacaaatctgacgaggaaaactgcggtatgggcggggccagggtgggggcggggcgtcctatcacctgtccctgggctcccccaggtgtgggacatgcagtgatttaggtgccgaagtggatttccaacaacatgccaagaaagtattcccatttcatgtttgtttcttttttttcttttctttctttattttgtttttgagatggagtctcactctgtgatttttttcatctctaaatttcctacatccatatggccaccatgaggccccaggctggccgatggttgctgttagcttattgggaaatcactgtttggaaggtgctggttgttttttgttgtttgttgtttttgtttttgtttttgttttgagacggagtctcgctctgtcgccagggtggagtgcagtggcgcgatcagctcactgcaacctccgcttcctgggttcaagccattctcctgcctcagcctcccaagtagcgcggattacaggcatgtgccaccacctccggctatttttttttctatttagtagagatggggtttcaccatgttagtcaggctggtcatgaactcttgacctcaggtgatccacccgcctcggcctcccaaagtgctgggattacaggcgtgcactgctgcacccagcctttttttgtttttttgagacagggtcttgctgtcacccaggttgaagtaaggtggcacgattatggctcactgcggccttgatctccttggctcaagcgatcctctcacttcagcctctcaagcagttggaaccacaggctgtaccaccaagcctggccaatttttttgtacagacacaggctggtcttgaactcctgggctcaagcaatcctcctgccttggcctcccaaagtgctgggattccaggcatgagccgctgcacccggcaaaaggccctgcttctttttctctggttgtctcttcttgagaaaatcaacacactctgtcctgttttccagctgtggccacctgtcgccctgacgaattccagtgctctgatggaaactgcatccatggcagccggcagtgtgaccgggaatatgactgcaaggacatgagcgatgaagttggctgcgttaatggtgagcgctggccatctggttttccatcccccattctctgtgccttgctgcttgcaaatgatttgtgaagccagagggcgcttccctggtcagctctgcaccagctgtgcgtctgtgggcaagtgacttgacttctcagagcctcacttccttttgttttgagacggagtctcgctctgacacccaggctggagtgctgtggcacaatcacagctcacggcagcctctgcctctgatgtccagtgattctcctgcctcagcctcccgagtagctgagattaaaggcgtataccaccacgcccggctaattttttgtatttttattagagacagggtttctccatgttggccaggctggtcttgaactcctggtctcaggtgatccacccgcctcggcctcccaaagtgctaggattacaggtgtgagccactgcgccaggcctaatttttttgtatttttagtagagatgcggttttgccatattgcccaggctggtctcgaactcctgggctcaagcgatctgcctgccttggcctcccaaagtgctgggattacaggcacaaaccaccgtgcccgacgcgttttcttaatgaatccatttgcatgcgttcttatgtgaataaactattatatgaatgagtgccaagcaaactgaggctcagacacacctgaccttcctccttcctctctctggctctcacagtgacactctgcgagggacccaacaagttcaagtgtcacagcggcgaatgcatcaccctggacaaagtctgcaacatggctagagactgccgggactggtcagatgaacccatcaaagagtgcggtgagtctcggtgcaggcggcttgcagagtttgtggggagccaggaaagggactgagacatgagtgctgtagggttttgggaactccactctgcccaccctgtgcaaagggctccttttttcattttgagacagtctcgcacggtcgcccaggctggagcgcaatggcgcgatctcggctcactgcaacctctgcctcccaggttcaagtgattctcctgcctcagcctcctgagtagctgggattacaggcgcccaccaccaagcccgggtaattttttgtatgtttagtagagatggggtttcactatgttggccaggctggtgttgaactcctgacctcatgatccgcccacctcggcctcccaaagtgctgggattacaggcgtgacccaccccatgaaaaaaaattaaaaaatgaagcgatgctgggcgcggtggatcacgcctgtaatcccagcactttgggaagctgaggcaggcagatcacgagggcaggagattgagaccatcctggctaatacggtgaaaccccatctctactaaaactacaaaaaattagccgggtgtggtggcaggcacctgtgatcccagctactcaggaggctgaggcaggagaatcgcttgaacccaggaggtggaggttgcagtgagccgggatcacaccattgcactccagcctgggtgacagagtgagactctgtctcaaaaaaaaaaaaaaaaaaaaaagcgaattctgaaatacatgaattcttttccttagatgcctgcttctgtcttgaggtttgttgttgttatttcgaaacagagtcttgctctgtcgctcaggctggagtgcagtggcatgatcttggctcaccacaacctccggctcccaggttcaagcgattcttctgcctcagcctcctgagtagctgggattacagctgaatgccaccttgctgggctaatttttgtatttttagtagagatggggtttcaccatgttggccaggctggcctcgaactcctgacctcgagtgatctgcccgcctcctgaagtgctgggattacaggcgtgagccacctcgtcctggtgagggtttttttttttccccaaccctctgtggtggatactgaaagaccatattaggataactgtacagtatagagaaggcagtggcaagttttctctgtcatataccagagtgggcttgggcatggtggcatactcctgtagtctcagctaatcaggaggctgaggaaggaggatcgcttgggcccaggagttggagactgtagtgagctgtgatcacaccaccacacttcaatctgggcaacagagcaagagaccctatctctaaaaaaaagtaagtatttcggacactgtgggccatacggtctctggtgcagtttctcaacatggctgttgggtgaacacaaccacgcacagaacgcaaaccaatacacgtggctgtgggcccagaaaatgttatttatggacacaaaaattggaatttcatataactgttttgtgtcatgaaaatgatttccctttttatttttatttttcttctcaagtatttaaatatgtaaaagccatttttaggcctggcaggatggttcacagctgtaatcccagcactttgggaggtcgaggcgggaggatcacgaggtcaggagatcgagaccatcctggccaacacagtgaaaccccgtctctactaaaaatacaaaaaattaaccaggcttggtggcgcgcgtctgtagtcccagctgctcaggaggctgaggcaggagaatcgcttgaatgcaggaggcggaggttgtagtgagccgaggttgcaccactgcactccagcctgagcgacagagtgagagtccgcctcaaacaaaaaaatgtttgcccatgctggtcttgaactcctgggctcaagctatctgcctgccttggtctcccaaagttctgggattacaggcatgagctacagcgcccggacttttgttgttttatatctatatatctatatataacttgttttatgtatatatataacttgttttatatatatacataaactgcagtaaaaaacatgtaacataaaatttaccttctcaaaccttattaagtgcacagttctgtgccattagcaaattcacactgttgtacaacatcacaaccaccatctccagaacttttttttttttttttattctttttgagacagagtctcactcgtcgcacgggctggagtgcagtggtgcgatctcggttcactgcaacctccacctaccaggttcaagcaattctcctgcctcagccccctcagtagctgggattacaggtgcccgtcctaccacgcccagctaatttttgtattttcagtagagactgactgggtttcaccatgttggccaggctggtctcgaactcctgacctcaagtgatcctcccacctcagcctcccaaagtgctgggaatacaggcatgagccactgcgcccggccccagaactcttttatcttcccaaactgaagctctgtccccatgaaacactcactctccatcccctccccaactcctggcacccaccattctactttctgtccctatgaatgtgatggctctagggacctcctctgagtggaatcagacagcattttccttttttgactggcttatttcactgagccaagtgcggtggcacacgcctgtaatcccaaaactttgggagaccgaggcgggcgcatcacctgaggtcaggagttcgagaccagcccggccaacatggtgaaaccccatctctagtaaaaatacaaaaaattagcctgtcatggtcgtgggtgcctgtaatcccagctaagtgggaggctgaggcaggagaatcgcttgtacccaggaggcggaggtcgcagtgagccgagatcgtgccattacactccagcctgggcaacaagagtgaaactccgtctctcctaaaaatacaaaaaaattagctgggcatggtggcacatgcctgtagtcccagctacttgggaggctgaggcaggagaatcacttgaacccgggaggtggaggttgtaatgagccaaggttggcggcgaagggatgggtaggggcccgagagtgaccagtctgcatcccctggccctgcgcagggaccaacgaatgcttggacaacaacggcggctgttcccacgtctgcaatgaccttaagatcggctacgagtgcctgtgccccgacggcttccagctggtggcccagcgaagatgcgaaggtgattcccgggtgggactgagccctgggccccctctgcgcttcctgacatggcaaccaaacccctcatgcctcagtttccccatctgttaagtgtgcttgaaagcagttaggagggtttcatgagattccacctgcatggaaaactatcattggctggccagagtttcttgcctctggggattagtaattaagaaatttcaggccgggtgcgtaatccctgtaatcccaacaccttgggacgccgaggcgggcagatcacctgaggtcgggagttccagaccagcctgaccaacatggagaaaccccgtctctactaaaaatacaaaattagccgggcttggtggtgcatgcctataatcccagctactcaggaggctgaggcaggagaatcacttgaacctgggaggtggaggttgtggtgagccaagatcgtgccattgcactccagcctgggcaacaagagtgaaactccatccaaaaaaaaaagaaaagaaaagaaaaaaaagaaaagaaatttcagctgacacagcttcacactcttggttgggttcccgtggtgaatgatgaggtcaggtgatgactggggatgacacctggctgtttccttgattacatctcccgagaggctgggctgtctcctggctgccttcgaaggtgtgggttttggcctgggccccatcgctccgtctctagccattggggaagagcctccccaccaagcctctttctctctcttccagatatcgatgagtgtcaggatcccgacacctgcagccagctctgcgtgaacctggagggtggctacaagtgccagtgtgaggaaggcttccagctggacccccacacgaaggcctgcaaggctgtgggtgagcacgggaaggcggcgggtgggggcggcctcaccccttgcaggcagcagtggtgggggagtttcatcctctgaactttgcacagactcatatcccctgaccgggaggctgtttgctcctgagggctctggcaggggagtctgccgccctgttaggacttgggcttgccagggggatgcctgcatatgtcctagtttttgggaatatccagttaacggaaccctcagccctactggtggaacaggaaccggctttcctttcagggacaacctggggagtgacttcaaggggttaaagaaaaaaaattagctgggcatggtgccacacacctgtggtcccagctactcagaaggctgaggcgggaggattgcttgagggcaggaggattggttgatcctcccacctcagcctccggagtagctgggacctcaggtgcatgccactatgcctggctaattttcttttttctttttttttttttttcgagacggagtctcgctctgttgcccaggctggagtgcagtggcaggatctcggctcactgcaagctccgcctcccgggttcacgccattctcctgcctcagcctccccagtagctgggactacaggagcccgccactgcaccaggccaatttttttgtatttttagtagagacggggtttcactgtgttagccaggatggtctcgatctcctgacttcgtgatccgcccacctcggccttccaaagtgctcggattacaggcgtgagccactgcgcccagccgctaattttcatatttttagtaaaaacagggtttcaccatgttggccaggctagtcttgaactcctgaacccaagtgatcctcctgccttggcctcccaaagtgctgggattacagacaccacacctggctattattattttttagagacagggtgctgctctatcttccagcctgtagtgcagtgcagcctccatcatagctcgctgcagccttgacctcctgggttcacgtgatcgtcccgcctaagcctctggaggagctgggagtactggcatgtgccaccatgcctggttaatttttttttttttttttttgagacagagtctcattctgtcacccaggctggagtgcggtggtgcgatcttggcttactgaaacctccacctcccaggttccagcaattctcctgcctcacccttctgagtagctgggattacaggttccggctaccaaacctggctagtttttgtatgtttagtagagacagggtttcaccatgttggtgaggctggtctcgattctcccgcctcagcctcccaaagtgctgggattacaggcttgagccaccgtgcctggcttttttttttttttttttttttgtggcaataaggtctcattgtcttgcccaggctagccttatgctcctagcctcaagtgatcctcctccctcagcctcccaaagtgctgggattacaggtgggcgccactgtgcctgttcccgttgggaggtcttttccaccctctttttctgggtgcctcctctggctcagccgcaccctgcaggatgacacaaggggatggggaggcactcttggttccatcgacgggtcccctctgaccccctgacctcgctccccggacccccaggctccatcgcctacctcttcttcaccaaccggcacgaggtcaggaagatgacgctggaccggagcgagtacaccagcctcatccccaacctgaggaacgtggtcgctctggacacggaggtggccagcaatagaatctactggtctgacctgtcccagagaatgatctgcaggtgagcgtcgcccctgcctgcagccttggcccgcaggtgagatgagggctcctggcgctgatgcccttctctcctcctgcctcagcacccagcttgacagagcccacggcgtctcttcctatgacaccgtcatcagcagagacatccaggcccccgacgggctggctgtggactggatccacagcaacatctactggaccgactctgtcctgggcactgtctctgttgcggataccaagggcgtgaagaggaaaacgttattcagggagaacggctccaagccaagggccatcgtggtggatcctgttcatgggtgcgtatccacgacgctgagggctgcagagggaatggagggagcaggaaggagcttcaggaactggttagtgggctgggcatggtggctcaaagcacctgtaatcccagcactttgggaggccaaggtgggtggatcatcaagaccagcctgaccaacatggtgaaacctcgtctctactaaaaatacaaaaattagccgggtgtggtggtgggcacctgtaatcccagctgctcgggaggctgaggcaggagaatcacttgaacctgggagatggaggttgcagtgagccaagacagccccactgcactccagcctgggtgacagagtgagactccgtctcaaaaaaaaaaaaaaaaactaaacaaaaaactggttagtggctagacaacaggatggtatcttccaagcccatggctgactcagcagctcctgggtcaagacactgtgacctgtgtcccctggcaggaagcatcgcccctgccacctgcccggtgtactctgtacctgtcaggtgacatctgctacctaagcacgtgagaggtggcatttcacagtttcagtgtggtgctgacaacccgggacgcacactgtccttgcagctacaatcaggaggtgaatgttgggtttccagcagagaacactggagaaggcacacttggtgtctggaagggaaaagcagggaagagagcatcatcagatgcctgcgggtgaaggtgggcccgctatggccagcgtccctttttatttttatttatttatttatttgagatggaatctcgctctgtcgcccagactgtagtgcagtggtgcgatcacggctcactgcaagctccgcctcacaggttcacgccattctcctgcctcagcctcccgagtagctgggactacaggcacccgccaccacgcccggttaattttttgcatttttattagagacggggtttcaccgcgttagccaggatggtctaaatctcctgaccctgtgatccacccgcctcggcctccctaagtgcttggattacaagcgtgagccaccacgcccggccccctttttattttttattttttgagacggagtctcgctctgtcgcccaggctagattgcagtggcgtgatctcggctcactgcagcctccgcctcccaggttcaagtgattctcctgcctcaacctcccaactaattaggattacaagcatgtaccaccatgcctgactaattttttgtatttttagtagagactgggtttcaccatgttggctaggctggtctcgaacccttagcctcaagtaatctgcctgcctcagcctcccaaacagcggggattacaggcatgagccactgtgcccaacccaaccctggatctcttttaaacaagacaatgctcgctgttgccacagaacaatgggtggggtacatgtggcccagtgtgtttggccacataactgccaggccagagggaaagagactctcagactgtctccactcagatacaaatgtgtgtgttgtgtgcgtgtgttctggtctcatatttgtttgttttgagacagggtgtcgctctgtcactgagtctggagtgcagtggcgcaatcagagttcactgcagcctcaaactcttgggctcagttgattctcccacttcagcctcccaagtagctggaactacaggtgaacaccactgtgcccagctaatttattttatttttagtagagatgaggtctcactatgttgcccaggctggtcttgacctcctagcctcaagcaatcctcctgccttggtctcccaaagtgctgggattacacgtgcgagccattgcgcatggcttgtgttcttgtgtttcttcctttttctttcgagatggcgtctcagtctgccacccaggctggagtgcagtggtgtgatcatagctcactgtagcctcaacttcctgggctcaagcaatcctcttgatttcagcctcccgggcctggccagcatggtgaaaccccgtctctactaaaaatacaaaaatgtagccaggcgtggtggtgggcgcctgtaatcccagctacaccagaggctgaggcaggagaatcgcttgagcctggaaggtggaggttgcagcaagccaagatcgtgccactgcactccagcctgggcaacagagacagactctgtctcaaaaaaaaaaaaaaaaaacccaaacaagccacatttggagtttggggttcccagcaggactatttcccaagcctgagcctggctgtttcttccagaattcgttgcacgcattggctgggatcctcccccgccctccagcctcacagctattctctgtcctcccaccagcttcatgtactggactgactggggaactcccgccaagatcaagaaagggggcctgaatggtgtggacatctactcgctggtgactgaaaacattcagtggcccaatggcatcaccctaggtatgttcgcaggacagccgtcccagccagggccgggcacaggctggaggacagacgggggttgccaggtggctctgggacaagcccaagctgctccctgaaggtttccctctttcttttctttgttttttctttttttgagatgaggtcttggtctgtcacccaggctggagtgcactggcgcaatcgtagctcactgcagcctccacctcccaggctcaagtgatcctcctgcctcaccctcctgagtagctgagattacagacacgtgccaccacggcagactaattttattttatttttgggaagagacaaagtcttgttatgttggcctggctggtctcaaactcagggtgcaagcgatcctcccgcctcagccttccaaactgctgggattacaggcgtgggccaccgtacccagcctccttgaagtttttctgacctgcaactcccctacctgcccattggagagggcgtcacaggggaggggttcaggctcacatgtggttggagctgcctctccaggtgcttttctgctaggtccctggcagggggtcttcctgcccggagcagcgtggccaggccctcaggaccctctgggactggcatcagcacgtgacctctccttatccacttgtgtgtctagatctcctcagtggccgcctctactgggttgactccaaacttcactccatctcaagcatcgatgtcaacgggggcaaccggaagaccatcttggaggatgaaaagaggctggcccaccccttctccttggccgtctttgaggtgtggcttacgtacgagatgcaagcacttaggtggcggatagacacagactatagatcactcaagccaagatgaacgcagaaaactggttgtgactaggaggaggtcttagacctgagttatttctattttcttctttctttttttttttttttttgagacagagttttgctctcgtttcccaggctggagggcaatggcatgatctcggctcaccgcaacctccacctcccaggttcaagtgattctcctgtctcaggctccccagtagctgggattacaggcatgcaccaccaccatgcccggctaattttgtatttttagtagagacggagtttctccatgttggtcaggctggtctcgaactcccgacctcaggtgatctgcctgcctcggcctcccaaagtgctgggattacagacttgagccaccgcgcccagctatttctgttttctttctttcttcttcttctttttttttttctaagagacaggatctcactctgtccccaggcaggagtgcagtgctgtgatcatagctcactgcagccttaacctcctgggctcaagtgatcttcccacctcagcctcccaagtagctggaactacaggtgcacaccaccatgcccagctcatttttgtattttttttttttttgagacagtctcgttctgtcaccccggctggagtgcagtggtacaatcttggctcactgcaacctctgcctcccaggttcaagcgattctcctgcctcagcctcctgagtagttgagattacaggcatgtgtgccatcatacctggctgatttttgtatttttttttagagatggggtctcagtatgttgaccaggcttgtcttaaactcccggcctcaagtgatcctcccacttcagtctcccaaagtgctgggattacaggcatgagccactgcggccggtttgttttcttttttttttcgttttttggagacggaatttcacctttgttgcccaggatggagtgcaatggcacgatatcgcctcaccacaacctctgcctcctgggttcaaaccattttcctgcctcagccttcttagtagctgggattacaagcatgtgccaccacgcccggctgattttgtatttttagtagagatggggtttctccatgttggccaggctggtctcgaactcctgacctcaggtcattcgcccacctctgcctcccaaagtgctgggattacaggcgtgagccaccgtgcccggtggtttgtattctttttactgagagtcgtgaaaggcagtgatcctctgtcacatgtgatcttggctctcaggggacatttggcaatttctagagattttttggttgtcacaagtcaatggggaagactgttggcatttagtgggtagaggctggtgacgctgctgaacacccagaacagggaagtagcaggccctagatagagccatcgtggggaaaccctgctctaaggaaatggcgctattttataaccccacgttcctggcatgattaccaacagccaaaagtggagtccccccaagtgtgttcgtccatttgcattgcagtaaaggaatagctgaggccgggtaatttataaagaaaagagatttaaactgggtatggcagtttatgcctataatcccagaactttgggaggctgaggcaggaggatcgcttgagtccaggagtgtgagaccgagaccagcctggccaacatgacgaaactctgtctctacaaaaaatacaaaaagtaggccaggcacggtggttcacgcctgtaatcccagcactttgggaggccgaggcgggcggatcacgaggtcaggagatcgagaccatcctggctaacacggtgaaaccccgtctctactaaaaatacaaaaacaaaattagccgggtgtggtggcaggcgcctgtagtcccagctactcgggaggctgaggcgggagaatggcgtgaacccgggaggcggagcttgcagtgagccaagatcgcgccactgcactccagcctgggtgaccgagttgagactccgtctcaaaaaaaaaaaaaaaaaaaaaaatacaaaaagtagccaggtgtggtggcaggcacctgtaatcctgggttctcgagaccgaggcatgagaattgcctgaccccaggaggtggaggctgcagtgagccaagatcatgccactgcactccagcctgggcgacagagtgggactctgtctcaaaaaacaacaaaaaaaaagttctggaaatggatggtggtgatggtgatacttccacaacagcgtgaatctgcttaaggccaccgaactgtgcactcacaaatagtcgagatggtacattttatgttatgtgtatttcaccacaattaaaaactagttgtgggccaggtgtggtggttcatgcctgtaatcccagcactttgggaggtcagagggaggtggatcatgaggtcagcagttcgagaccagccaggccaacatggtgaaaccccatctctactaaaaatacaaaaattagccaggcgtggtggcacatgcctgtagtcccagctacttgagaggctgaagcaggagaatcgcttgaacctgggaggctaagattgcagtgagccgagatcgtgccactgcactccagcctggacgacagagtgagacttcgtctcaaaaaaaaaaccaaaaaaaaaattagctgtgggtcaggcactgtggctcacgcctgtaatcccagcactttgggagaccgaggtaggtggatggcctgaggtcaggagttcgaatccagcctggccaacatggtgaaagcccgtctctactaaaaatacaaaaaattagtcaggtatgttggcacacctgtaatcccagctactcgggaggctgaagcaagagaatcgtttgaacccaggaggtggacgttgcagtgagccgagattgggccactgtactccagcctgggcaacaaaagtgaaactctgtctgaaacaaacaaacaaacaaacaaacagacaaacaaaaaaactagttgtggagagagggtggcctgtgtctcatcccagtgtttaacgggatttgtcatcttccttgctgcctgtttaggacaaagtattttggacagatatcatcaacgaagccattttcagtgccaaccgcctcacaggttccgatgtcaacttgttggctgaaaacctactgtccccagaggatatggttctcttccacaacctcacccagccaagaggtaagggtgggtcagccccacccccccaaccttgaaacctccttgtggaaactctggaatgttctggaaatttctggaatcttctggtatagctgatgatctcgttcctgccctgactccgcttcttctgccccaggagtgaactggtgtgagaggaccaccctgagcaatggcggctgccagtatctgtgcctccctgccccgcagatcaacccccactcgcccaagtttacctgcgcctgcccggacggcatgctgctggccagggacatgaggagctgcctcacaggtgtggcacacgccttgtttctgcgtcctgtgtcctccaactgccccctcctgagcctctctctgctcatctgtcaaatgggtacctcaaggtcgttgtaaggactcatgagtcgggataaccatacttttcttggatggacacatcagcaccgggcttgacatttacccagttcccctttgatgcctggtttcctctttcccggccccctgaagaggtgatctgatttctgacaggagccctgagggaggaaatggtcccctttgttgacttttctttttctttatttttttcttttgagatttgctgtcacccagcctggaatgcagtggtgccatcttggctcactgctacctctcccactgggttcaagcaattctcctgcctcagcctcccaagtagctgggattacaagcatgcgccaccatgcctggctaagttttgtatttttagtacagacagggtttctccatggtggccaggctggtcttgaactcctgacctcaggtgatcctcccacctctgcctcccgaagtgctacgattacaggcatgagccaccgcgcccatccccctttgttgacttttctcatcctctgagaaagtctcagttgaggccagcacctccctcaagtgaattgaatctcccttttgaacaacaacaaataacaatatgacccagacgtggtggctcacacctgtggtcccagctactcgggaggctgaggtgtgaggattgcttgagcccaggaggtcaaggctacagagagctataatcacaccacttcactccagcctgggggacaaagtgaaaccctgtctgaaaaaaacaaaaaaagaaaaaggaaaaagaaacaatacgatcacaaagtagatattcatagtgtttattttcagtactcttttttttttttttttttttttttgagacggagtcttgctctgttgcccaggctggagtgcagtggcacgatcttggctcactgcagcctctgcctcccaggttcaagcgcttggctcactgcaacctccgcctcctgggttcaagcgcttcttctgcctcagcctccccagtagctgggactataggcacgtcccactacgcccagctaattttttgtattttttagtagagatggggtttcactatgttagccaggatggtctcgatctcctgacctcgtgatctgcctgccttgggctcccaaagtgttgggattatgggcatgagccactgcacctggccttttttttttttttttttgagatggagtttcgctcttgttgcccaggctggagtgcaatggtgtgatctcggctcactgcaacctctgcctcctgggttcaagcaattctcctgcctcagcctcccgagtagctgggattacaggcacctgccaccacgcctggctaatttttgtacttttagtagagacggggtttctccatgttggtcaggctggtctcaaactcctgacctcaggtgatccacccacctcggcctcccaaagttctgggattacagacatgagccaccgcgcctggccgtgtctggccttttttagttatttcttttttttttttttttttttttgagacagagtcttactccgtcgcccaggctggagtgcagcggtgcgatgtctgcgcactgcaagctccgccccctgggttcatgccattctcctgcctcagccttctgagtagctgggactgcaggcgcctgccactacgcccggctacttttttgtatatttagtagagatggagtttcactgtgttagccaggatggtctcgatctcctgactttgtgatccgcccgcctcggcctcccaaagtgctgggattacaggcgtgagccaccatgccaggcttttttttttttttttttttttgagacggagtcttgctctgtcgcccaggctggagtgcagtgccatgatctcagctcactgcaagctccacttcccaggctcacgccattctccagcctcagcctcccaagtagctgagactacaggggcccgccaccacactcggctaatttttttgtatttttagtagagacggggtttcaccatgttagccaggctggtcttgaactcctaacctcaggcgattcacctgcctcggcctcccaaagtgctgggattaaaggtatgagccacctcgcctggtgtgagccacctcgcccagcctgagccacctcacccagcctaagccactgtgcctggcctgattttggactttttaaaaattttattaataattatttttgggtttcttttttttgagacagggtcttactctgtcatccaggccatcctgtctgtctgtcatcccagtgatgggatcataccttgctgcagcctctacctcctgggctcaagcgatcctcccccctcagcctcctgagtagctgggagtacaggtgtgcaccaccacacctggctaatttttttttttttttttgtatatagagatggtattttgccatgttgaccaggctagtcttaaactcctggactcactcaagagatcctcctgccttggcctcccaaggtcatttgagactttcgtcattaggcgcacacctatgagaagggcctgcaggcacgtggcactcagaagacgtttatttattctttcagaggctgaggctgcagtggccacccaggagacatccaccgtcaggctaaaggtcagctccacagccgtaaggacacagcacacaaccacccgacctgttcccgacacctcccggctgcctggggccacccctgggctcaccacggtggagatagtgacaatgtctcaccaaggtaaagactgggccctccctaggcccctcttcacccagagacgggtcccttcagtggccacgaacattttggtcacgagatggagtccaggtgtcgtcctcactcccttgctgaccttctctcacttgggccgtgtgtctctgggccctcagtttccctatctgtaaagtgggtctaataacagttcttgccctctttgcaaggattaaatgggccaaatcatatgaggggccaggtccttcaggctcctggttcccaaagtcagccacgcaccgtgtgggtcccaaaattttatcaaggcacattcgttgcctcagcttcaggcatctgcccaaaaaggccaggactaaggcaaggagagggagggattcctcagtactcagcttttcacagaggctccaaaaggctaaggaatccagtaacgttttaacacaattttacaatttttttttttgagacggagttttgctcttgttgcccaggctggagtgcagtggcacgatctcggctcactgcaacctctggctcccgggttcaagcgattctcctgcctcagtctcccgagtagctgggattacaggcatgcgccaccacgctcggctaattttgtatttttagtacagaaggggcttctctgttggtcaggctggtcgtgaactctcaacctcaggtgagccacccgcctgagcctcccaaagtgctgggattacaggtgtgagccaccacgcctggccttttttttgagacagagtctcgctctcgcccatgctgtactgcagtgacgcagtctgggctcactgtaacctccgcttcccaggttcaagtgattcttctgccgcagcctcccatgtagagtagctgggattacaggcacccgccaccatgcctggctaattcttgcatttttagtagagatggggtttcacagtgttggccaggctggtctcaaacttctgacctcaagtcatctgcctgccttggccctgccaaagtgctgggattatagatgtgagccaccgcgcctggcctacagtttattctttggtggctcacacctgtaatctcagcactttgggaggccaaggtgggagaatggcttgagcccaggagttcaagtccagcctgggcaacatagcaagaccctatctctactacaaaataaataataaataaactaattttttttcttttaaaacccaactattcaacatggcaatgcaatatattaaaaaaattttttttttctttgaaacggagtctctcactgtcacccgggctggagtgcagtgtcgccatcttggctcactgcaacctccgcctcccaggtccaagtgattctcctgcttcagcctcccgagtagctgggattacaggcacccaccaccatacccagctaatatttttgtatttttagtagagatggggtttcactatgttgggcaggctggtctggaactcctgacctcgtgatctgcccgaggatcggcggcctcccaaagtgctggggattgcaggcatgagccaccgtgcccagccaaaacttttttatttttatttttttgggacacggtctcactgtgtaccccagactggagtgatagagtgctgtcatggctcactgcagcctcaacctccctgggctcaggtgatcttcctgcttcagtctcccaggtagctgggactacaggcatgagccaccacacccagctaatttttgaatttttttgtagagacagggtttcaccttgtggcccagacttgtctctaactccagggctcaagcgatctgcccaccttggcctcccaaagtgctgagattaatgcaatttaaaaaattttttggccaggcctggtggctcatgcctgtattcacaacaccttgggaggcaaaggtgggcagatcacttgaggtcaggagttcgagactagcctggccaacatggtgaaaccccctgtctactaaaaaaatacaaaaattacctgggcacagtggtgggtgcctgtaatcccagctacttgggatgctgagggtggagaattgcttgaacctgggaggcagaagttgcagtaagccaagatcatgccactggactccagcctcagtgacagagcaaaactctgtctccaaaaaaattgttttttttttttttttttcaaatcatcacactacagccaaggcctggccacttacttttgtaaataaagttttattggagccagtggaccagtgaggccgaatcttgcaggtgtaagatcacagtctatccttgaaaattttgatattttgttcattgggtggtttttcattaatttaaattttaaaaaataacatattaaaggctggtgtggaggtgcacgcctgcagtcctagctactcccagaggctgaggcgggagacttgcttgagcccaagagttgaagtccagcctgggcaacatagcgagacccccatctctaaaaataaaaataatgcattagaatattattggattcctgggcagggcacagtggctcacacctgtaatcccagcactttgggaggctgaggtgggtggatcacctgaggtcaggagtttgagaccagcctggccaacatggtgaaaccccgtctctactaaaaatacaaaaattagccaggcgtggtggcaggtgcctgtaatcccagctactcgggaggctgaagcacgagaatcgcttgaatccaggaggcggaggttgcagtgagctgagattgcgccattgcactccagcctggaggacaagagtgaaactccattcccctctgcaaagaaaaggaatattatcagattcctaagctttttggctccccctttagtttgggggctggggtggtgagtgtctgacctggcctcactgtcctccctggatgtgatgagacccaggtgtgggtcaggatgtcattcgtttgtccaccagagggcgcccaaactgctttgagctgctgggaaatggtgctcctagacttttagcaaacaaacaaaaaaaaatggcacatcggcaaatttcagaccattctttttttttttttttttggttccagagtagctgaaatctttgttcagttacaagcaggataaaatggaaactgcctgggagaggctgagaaaccttcttgcttgggggaggtggggcactgctagaattaatcgcttcacagaccagcccatccaggactcctcaaatttggcaaaaaagccattcattcattcattcatttatgtagagacgagggggatctggctatattgcctagattggtctcaaattcctggcctcaagtgatcctcctgccttggtctactaatgtgctgcgattacaggcatgagccaccgtgcctagctctagtggacttgaaatgttgccttgcccagggcccttatgttgaatggcccaggtccacttgtatggttctgtaccaaggttaaccccatcccataatgcctgggacagttgatgcaggacaatcagcttctgtgccattcaacctcaggactgagcatgctgggcattgtggggtccgaaggtggctcccctgtccccttcaaaataccctctttttcttttcttcttttttttttttttttttttttgagacgaagtcttgctctgttgccccagctagagtgcagtggtgcgatctcagctccccgcaacctctgcttcccgggttcaggcgattctcctgcctcagcctcctgagtagctgggattacaggtgcccaccgccacagctggctaatttttgtatttttagtagagacagggtttcaccgtgttggccaggctggtcttgaactcctgacctcaggcaacctgcccacctcagcctcccaaagtgctgggattacaggtttgagccactgggcctggccttttttttttttttttgagagggagtctcactctgttgcccaggctggagtgcaatggcgcgatcttgactcactgcaactccatttcccgggttcaagtgattctcctccctcagcctcccaagtagctgggattacaggtgcatgccaccacggccagctaattttgtatttttagtagagacagggtttcactatgttgatcatgctggtctcaaactcctgaccttaggtgatctgcccgccttagcctcccaaagtgttgggattacaggtgtgagccaccgcgcccagaccaaaatatgctcattttaataaaatgcacaagtaggttgacaagaatttcacctgcaaccttgtcaaccacctagaataaaagcctctgcagccctcccctaaagactcatcaatgtgaggctcaagaaccttcttaggctgggctcggtggctcatttctgtaatccctgcactttggaaggctgaggcaggaggatctcttgaggccaggagttcaagacaagcctgggcaacatagccagacctctgtttctatcccccacaaaaagaaccttcttaaaccggaattgagtcctacaacctcgataactcacaaataagcccgtgtggcctctcacagacttgggaagttctccaagtgtccagggagatgtgccaggcgctttcctgccgtgaccaccgtcctctgcctgctccatttcttggtggccttcctttagacctgggcctcactcttgcttctctcctgcagctctgggcgacgttgctggcagaggaaatgagaagaagcccagtagcgtgagggctctgtccattgtcctccccatcggtaagcgcgggccggtcccccagcgtcccccaggtcacagcctcccgctatgtgacctcgtgcctggctggttgggcctgttcactttttctcctggacagggaacagccccactggtgtcctttatcacccccacggcctctcctggcttggggctgacagtgacaagatcagacagctaaggggtcagatggaggatgtggagctgggtcccgtgctgtggaatagcctcaccgagatttgagtgccttctggggaactggttcccttgcagggggctgtgtggagaggcgcgctctccctgcctcacccatgctcatcctaactcggttaccatcacatctcttttttctttttttcttaaattttaagaaaaaagaaatttaatttttttgagagacagagtcttgctctgtcacccaggctggagtgcagtggcaccatcatgcctcgctgcagcctcaatgtctgggctcaagcgatcctcccacctcagcctcctgagtagctggtgcaagccactataccccacttcctatttcttaaaaagtcacagccctgtgtgtggctaatcctggacagaaatctagaagaagtcagctacttctggggcgtggctcacccagtgggcttcaggttagatatttcttatacttatgaggctgggtgtggtggcttatgcctgtaatcccagcactttgggaggctgaagtgggtggattgcttgggctcaggagttcgagaccaacctgggcaacatggcgaaaccctgtttctagaaaaggtacaaaaattagctgggcaggtggcacgtgcctgtggtaccagctacttgagggcctgaggcaggaggatcgcttgaacctgggaggtcgaggttgcagtgaactgagatcatgtcactgcactccagcctggtgacagagcaagaccccgtctcaaaaaaaaaaaaagaaagaaaaaaattcttatgcatagatttgcctcttttctgtttgtttgttttgagatggagtctcgctctgtcgcccaggctggagtacagtggctcaacctcggctcactgcaacctctgcctcccgggttcaagcaattctcctgcctcagcctcctgagtagctgggactacaggcgcccgccaccatgcccagctaatttttgtatttttagtagagactgactgggtttcatcatgttggccaggctggtctcgaactcttgacctcatgatccgcccgcctcagcctcccaaaatgctgggattacaggcgtgagccaccaggcccaggccgcaaggcgatctctaaacaaacataaaagaccaggagtcaaggttatggtacgatgcccgtgttttcactccagccacggagctgggtctctggtctcgggggcagctgtgtgacagagcgtgcctctccctacagtgctcctcgtcttcctttgcctgggggtcttccttctatggaagaactggcggcttaagaacatcaacagcatcaactttgacaaccccgtctatcagaagaccacagaggatgaggtccacatttgccacaaccaggacggctacagctacccctcggtgagtgaccctctctagaaagccagagcccatggcggccccctcccagctggaggcatatgatcctcaagggaccaggccgaggcttccccagccctccagatcgaggacagcattaggtgaatgcttctgtgcgctcattcagaatgtcagcggacaatggccttggtggtgtagaggaatgttggataagcaaatagagagctccatcagatggtgacagggcaaagaaagtcaaaaggagttcagaggccgggcgcggtggctcatgcctgtaatcccaggactttgggaggccgaggctggcggatcacctgaagtcaggagtttgagaccagcttggccatcatgacaaaaccccgtctctattaaaaatacaaaaaattagccaggcgtgggagtgggcgcctgtaatcccagctactcgggaggccgaggtagaaaaatcgcttgaacctaggaggcagaggttgcagtgagccgagatcgcgccactgcattccagcccgggaggcaagagcaaaactccatctcaaaaaaaaaaaaaaaaggagttcagaggcccggcatggtggttcacacatgtgatcccagaacttggggaggttgaggcaggagaatcacctgagctcagagttcaagaccagcctgggcagcacagcaagaccccatctctgcaaaaaataaaaatttagcccagtgtggtgatgagcgcctagttccagctactagggaggctaaggcaggaggattgcttgaggctaaggtaggagattgagactgcagtgacttgtgattgcgtcactgcgctccagcctgggtgacagagcaagcccttgtctcttaaaaaaaaaaaaaaattcaaagaagggtttccagagggccaggagggaggaagggagaggaggtgttttatttttttgcttttattttttattttgagacagagtctctctctgtcacccaggttggagtgcagtgctgtgatcttggctcactgcaacttctgcctcctgggttcaagcaattcttatgcctcagcctcagcctcctgagtagctgggattacaacactatgcccgggtaatttttgtatttttagtagagacgaggtttcgccatgttgcccagactggtctcgaactcctgacctcaagtgatccacccgccttggcctccccacgtgctgggattgcaggcgtgagccactgcgcccgccttgatctttacacaaggggtttagggtaggtagccttctctgaaccaggagaacagcctgtgcgaaggccctgaggctggaccgtgcctgttgggtttgaggccgttgtagctggagcaaacagagagaggggtaaaaaggcaggaggctaccaggcaggttgtgcagagccttgtgggccactggggaggactttggcttttgccctgagagcggtgggaagtgactgaatccggtactcaccgtctccctctggcggctcctgggggaacatgcttggggatcaggctgggggaggctgccaggcccaggaggtgagaagtaggtggcctccagccgtgtttcctgaatgctggactgatagtttccgctgtttaccatttgttggcagagacagatggtcagtctggaggatgacgtggcgtgaacatctgcctggagtcccgtccctgcccagaacccttcctgagacctcgccggccttgttttattcaaagacagagaagaccaaagcattgcctgccagagctttgttttatatatttattcatctgggaggcagaacaggcttcggacagtgcccatgcaatggcttgggttgggattttggtttcttcctttcctcgtgaaggataagagaaacaggcccggggggaccaggatgacacctccatttctctccaggaagttttgagtttctctccaccgtgacacaatcctcaaacatggaagatgaaaggggaggggatgtcaggcccagagaagcaagtggctttcaacacacaacagcagatggcaccaacgggaccccctggccctgcctcatccaccaatctctaagccaaacccctaaactcaggagtcaacgtgtttacctcttctatgcaagccttgctagacagccaggttagcctttgccctgtcacccccgaatcatgacccacccagtgtctttcgaggtgggtttgtaccttccttaagccaggaaagggattcatggcgtcggaaatgatctggctgaatccgtggtggcaccgagaccaaactcattcaccaaatgatgccacttcccagaggcagagcctgagtcactggtcacccttaatatttattaagtgcctgagacacccggttaccttggccgtgaggacacgtggcctgcacccaggtgtggctgtcaggacaccagcctggtgcccatcctcccgacccctacccacttccattcccgtggtctccttgcactttctcagttcagagttgtacactgtgtacatttggcatttgtgttattattttgcactgttttctgtcgtgtgtgttgggatgggatcccaggccagggaaagcccgtgtcaatgaatgccggggacagagaggggcaggttgaccgggacttcaaagccgtgatcgtgaatatcgagaactgccattgtcgtctttatgtccgcccacctagtgcttccacttctatgcaaatgcctccaagccattcacttccccaatcttgtcgttgatgggtatgtgtttaaaacatgcacggtgaggccgggcgcagtggctcacgcctgtaatcccagcactttgggaggccgaggcgggtggatcatgaggtcaggagatcgagaccatcctggctaacacgtgaaaccccgtctctactaaaaatacaaaaaattagccgggcgtggtggcgggcacctgtagtcccagctactcgggaggctgaggcaggagaatggtgtgaacccgggaagcggagcttgcagtgagccgagattgcgccactgcagtccgcagtctggcctgggcgacagagcgagactccgtctcaaaaaaaaaaaacaaaaaaaaaccatgcatggtgcatcagcagcccatggcctctggccaggcatggcgaggctgaggtgggaggatggtttgagctcaggcatttgaggctgtcgtgagctatgattatgccactgctttccagcctgggcaacatagtaagaccccatctcttaaaaaatgaatttggccagacacaggtgcctcacgcctgtaatcccagcactttgggaggctgagctggatcacttgagttcaggagttggagaccaggcctgagcaacaaagcgagatcccatctctacaaaaaccaaaaagttaaaaatcagctgggtacggtggcacgtgcctgtgatcccagctacttgggaggctgaggcaggaggatcgcctgagcccaggaggtggaggttgcagtgagccatgatcgagccactgcactccagcctgggcaacagatgaagaccctatttcagaaatacaactataaaaaaataaataaatcctccagtctggatcgtttgacgggacttcaggttctttctgaaatcgccgtgttactgttgcactgatgtccggagagacagtgacagcctccgtcagactcccgcgtgaagatgtcacaagggattggcaattgtccccagggacaaaacactgtgtcccccccagtgcagggaaccgtgataagcctttctggtttcggagcacgtaaatgcgtccctgtacagatagtggggattttttgttatgtttgcactttgtatattggttgaaactgttatcacttatatatatatatatacacacatatatataaaatctatttatttttgcaaaccctggttgctgtatttgttcagtgactattctcggggccctgtgtagggggttattgcctctgaaatgcctcttctttatgtacaaagattatttgcacgaactggactgtgtgcaacgctttttgggagaatgatgtccccgttgtatgtatgagtggcttctgggagatgggtgtcactttttaaaccactgtatagaaggtttttgtagcctgaatgtcttactgtgatcaattaaatttcttaaatgaaccaatttgtctaaactcgatgcacgttcttctgttcgcgcgcttctttttgtttttttttttttcctgagatggagcctggctctgtcacccctggctggagtgcagtggcatgatctcggcttactgcaagctccgcctcccaggttcaagcaattctcctgcctcagcctccctagtagctaggattacaggtgagtgccaccacgcctggccaattttttttttttttttttttttgagacagagtctcgctctgtcacccaggctggagtgcagtggtgtgatctcggctcactgcaagctctgcctcccaggttaatgccattctcctgtctcagcctcctgagtagctggggccacaggcgcctgccaccacgcccggctaatttttttttgtacttcttttagtacagacggggtttcaccatgttagccaggatggtctcgatctcctgaccttgtgatccacctgcttcggcctcccaaagtgctgagattacaggcgtgagccaccgcgggtggccaacgctaatttttttgtttttttagatggagtcttgctctgtcgcccaggctggagtgcagtggcgtgatctctgcctactgcaagctccgcctcccgggttcatgccattctcctgcctcagcctcctgagtaactgggactacaggcacccgccaccacgcccggctaattttttgtatttttagtagagacagggtttcaccgtgttagccaggatggtcttgatctcctgaccttgtgatccacccgtctcggcctcccaaagtgctgggattagaggtgtgagccaccacacctggcctagcctggctaatttttgtatttttggtagagacggggtttcaccatgttggtcaggctggtcttgaacttctgacctcaggtaatctgcctgcctcagtctcccaaagtgctgggattacaggtgtgagccaccgcgcctggcctcacttccttctgtcatctgtttgtggattggactccccaggagaaggacccagaaggggaagactcccagaactccgggcaagatgcaatctccgtgggctgccacagtgcctggcaggtgctgtgatggctgagctggtgattgtgttctctgctgtcgcttctctgagttggagattttgtcaagtcccctgctcatccattcatacactcgacaaatatctgttgagtgctaagtgcgaaccatgctctgccgtaggcttgtgggacactacaggggatataagaaatgaaagccgggtgtggtggctcacacctgtaatcctagcagtttgggaggccgaggcgggcagatcatgaggtcaggagatcgagaccatcctagctaacacagtgaaaccccatctctactaaaaatacaaaaaattagccaggcgtggtggtgggcgcctgtagtcccagctgcttgggaggctgaggcaggagaatagcgtgaacctgggagttggagcttgcagtgagccgagatcgcaccactgcactctagcctgggcaacagagcaagactccatctacaaaaaaaaaaaaaagaaatgaagtcttgatacggtggctcatgcctgtaatcccagcactttgggaggccaaggcaggcggatcacgagctcaggagatcgagaccatcctggccaacgtggcgaaacccagtctctactaaagatacaaaaaattagccaggcatggtggcgggcgcctgtagtcccagctacttgggaggctgaggcaggagaatggcatgaacccaggaggcagagcttgcagtgagctgagatcgcgccactgcactccagcctgggcgacagagcgagactctgtctcaaaaaaaaaacaaaaaagaaatgaaaatctccctgtctgtccttaaggacctgacatcattttattttatttatttttttgagacaaggtcttgctttattgcccaggctggagtgcagtggcacaatcttggctcactgcaacctccacctcccgggttcaagcgattctcctgcctcagcctcctgtgttgctgggatcacaggcgcgtacccggctaatttttatattttcagtagagatggggttttgccatgttggccaggctattcttgaactcttgacctcaagtcgtctaccgcctcggcctcccaaaatgctaggattacaggtgtgagccaccgcaccaagccaaatgttacttcattagagaaactccccctgaagaaaacttccttcctgccagttgcttttctgtccccatactctgtttaatattcttctagaatattcttctaaaatgtagcaattttttgtatctattctaaaaatggaggccaaggaaggcagatcacttgaggtcaggagtttgagactagcctggccaacatggtgaaaccatgtctctactaaaaagggtaagattttgaggctgcagtgagctatgacggcaccattgcactccaggctgggcaacagagcgagacaccatctcaataaaaaaaaaaaaaagcagggtgcggtggctcaagcctgtaatcccaacactttgggaggctgaggcaggcggatcatgaggtcaggagttcgagaccagcctgcccaacatagtgaaaccctgtctactaaaaatacaaaaaaattagccgggtatgctggcaggtgactgcaccataaaaaatgttcaagattaaacagggggacggtgaggtaacccagaaataagcaacagcagaaagcgccaccaccacaaaaccaggagaggaagatgtggtttctggagcctgggagctggtgagagccagaaactcataggagggaaagaagtgctgcagacatggtccccagcagagcgaggcggggaagagcccagcctgtcccccgctccaggctctatctcccaccagtgcctcccacgggctgagcccaacagggacaggctgatgaagcccaggcaatggtgccttactgggtggatcgaaggagggacagggttggcccaggggtgacacgacactggggtggttaggtccacaaacgtggctcatgcctgtaatcccagtaccttgggaagctgaggcaggaggattgcttgagcccaggagttcaagagcagtctgggcaacatagcaagaccccatctctaaaaaacgtttttaaatttctgggctcagtggctcatgcctataatcccagcactctgggaggccgaggcaggcggatcacctgaggtcaggagttcaaaaccagcctagccaaaatggcaaaaccccgcctctactaaaaatacaaaaattagttgggtgtggtggcgcatgcctgtaatcccagctacttgggaggctgaggcaggagaatcgcttgaactcgggaggccgaggttgcactgagccaagatcgcaccactgcactccagcctgacagagcgagacactgcgtcaaaaaaacagacaacaacaacagaaaaagttttaaaattaccagccggatgcgatggcgcacacctgtagtcccagatacttggaggctgaggtgggaagatctcttgagtccagcactttgggaggccaaggtgggcggatcacctgaggttgggggtttgagaccagcctgaccaacatggagaaaccccatctctactaaaaatacaaaattagctgggtgtggcggcgcatgcctgtaatcccagctacgcgggaggctgaggtaggagaattgcttgaacctgggaggaagaggttgcggtgagccgagattgcaccattgcactccagcctgggaaactctgtctcaaaaaaacaaaacaaaacacaacaaaaacccaaaaagagcagactgaccaggccgtctgggttcataacctggctctgccactgactcgctgggtgacaggcacctcagagcctcagtttccccacctgacaatggagacaaagctaatctccccctccccaggggctctggaagtggggcaggatggggctgcgcaggcgctcggagacaaaggcagggcctgtcatctttcctgcgtccacggggtggcacttccttcctgccttccgccttttgttttgggacgcttccaaaacgcccctgggagggaaaactgagcagcccacacaggaagcgtcctggagcctgcacacaggcgctcgataattgctcgattgacgaaattggtgctcaaccaagtggcaaacaggataagcgggctcagatggccaggaaaacgggagggcctgggaggtggcggctcgagggtgctgagactgagacgggagggtgggcaggaccggggtgcatccccaggcaggggtggggactgggagcacagcatgggtggggcatggcccagaggagaggccagaggtgatggaaggttctggtattcggccttggctgctgcattgggagcttgtatcagagctttgagggtgacacagacatgcagacattcagtttcctgacaatccatcgttctgccccgatggtcgccaaagggagggagggttgacagccacccattttacagagagaaataggaggctcgggtcactgtggctggattctgatcctcgccggttccagttctctggctcagaacggggccctggtaaaatgcgctgctggctccctggtctataggctcagcacccacccacccacccacttgtcctgcagggctgggggcagcctgcagcttggggaacgccacccctgcaggctggtggtcctgtcctgtctccgcaggctcaacagctctggccaggacagggtggaaggtgggaggaatttgtcccactcccagcaagtctgacacccacaactagtgtcccctgctgtccctccccttctcctgtccccaggccgttccccttccagcagcccgaggcatcccagaccacagctgtctgcagtgagtcagcctggagcctctgggctgagccgcggctgccagagggaggtggggagaggggtgcaggctgccctgccctgcagctggccctggcctaatcccctccccgctccccagtctggggtcagcaccctcctcccttgcaggcagtgattttccgtgatgatgaaggaataaaaaagccacggagggttctgagtgggagtccctggtccccatcaccccactgagcatggccgctggggtttcctggcaactttctgctccatccggagccgtccctcccctgggctgggctgctctggggctgttcctgggatggggagcggggagcttgggagtaaatagtgacatcagccacctagacaggcggggccactgtgtcaaggggccatgtcaggttcccttctcccagagctggggcttgtcttggaattggaaaatcctccccacattgccctgtggactgcaggcctggcgtgatcaaggacccctgccctcctgccatcccccttggtctcctccatgccagccttgctgtttcccctgcctggctcacagtctccacacctttatcccctgggggctcaagtctgggacaaatgacacctcctccctgggcctcccacagagccacagagcgtcaccccccaccaccccacagcgttcatttgtgggtcaggattaagagcacaagctctgaacacactcagctcagattaaagccctggctctgccacccgtctacagaaaaactgacacagtggcctccactggggtgtggctccatgaaggagggtctggcgggccacaggcttacagtactcatttctcttttcttttctttcttccttcatttcctttctctctctccttccttcctccctccctcccttccttccttctttcttcctttgtttctctctcttttttttttgagacggagtctcgctctgtcgcccaggctggagtgtagtggtgcgatctcagctcaaggcaaccaccacctcctgggttcaaacgattctcttagcctcctgagtagctgggattacaagcacgcaccaccacgcctggctagtttttgtgtgtttagtaaagatagggtttcaccatgttggctgagctggtcttgaactcctgacctcaagcaatctgccccacctcggcctccagaagcgttgggattacaggcgtgagccaccacaccggcttctcctctccctctcctctttctccttttccttcctttcttccttccttcccttccccttccttccttccttccttcattctttcttccccccgctcccccctctttttttttgagacagggtcttgctttgtcacccaggctggagcgcagtggtgcaatcctagctcactgcagccttgacctcccagggttgaggcaatcctcccacctcagcctcccaagtagccaggactacgagtgcacgccaccatgcctggctaattttttagtttttttttgtagagacaggagtctcactgtgttgtccaggctggtcttgaactcctcggttcaagcaatcttcctgccttggcctcctaaagtgctgggattacaggcgtgagccacagcacctggcccagtccacatttctaagtaaatatgggaggccagccaggtgcagtggctgtaatcccagcactttgggaggccgaggtgggtggatcacctgaggtcaggagttccagaccagtctggccaacatggtgaaatcccgtctttactaaaaatacaaaaattagccgggcgtggtggctcatgcctgtaatcccagcactttgggaggctgaggcggcagatcacaaggtcaggagatcgagaccatcctggctaatacggtgaaacccgtctctattaaaaatacaaaaaattagccgggcatggtggcaggagcctgtagtcccagctactcaggaggctgaggcaggagaatggtgtaaacccgggaggcagagcttgcagtgagccgagatggtgccactgcactccagcccaggtgagagtgtgagactccgtctcaaaaaaacaaaataaaacaaaaaatacaaaaattagcggggcgtgatggcaggtgcctgtagtcccagctacttaggaggctgagggaagagaatcacttgaacccgggaagcagaagttgcagtgagccgcgatcgcatcactgcactgcagcccgggtgacagagcaagactccatctcaaaaaaaaaaaaaaaaaaaagggaggccactggaggttgtggggccaccatgagagtcgacaagggtggcccacattcctagatgagttgcctggaggctgtagtcccagacctcaggggggtcccctccggaacccaaacactgtcatgccaatgacacaaaactggtcttcctggcctctcccatcctgtccagcctagaagggagactgagacttcagatccgacaaccatgggttcaaatccagccttgaaaacttcccatgcacaggcaagccccattgcgatctgtttcttttcttttcctttctttctttttttttttttttttttttttgagacagtcttgctctgtcacccaggctagagtgcagtggcgtgatctcggctcactgcaacctccgcctcacaggttcaagcgattctcctgcctcagcctcccaagtagctgggattacaggtgcccatcaccgtgcccagctaatttttgtatttttagtagagacgggagtttcaccatcttggccaggctggtctcgaactcctgacctcgtgatctgcttgcctcagcctgccaaagtgctgggattacaggggtgagccactgtgcccggctgcgatctgtttcttttaaccgtaaactgggaagaactttgaccacctcttagtccagaactatcagggaaggggcactgaatgccaggctggaggagggttgcatgaaaggcttgaccccagctactcaggaggctgaggcagaaggactgtttgacctgatgaattcgaggctgcagtgaggctgtgatcgcgccactgcactccagcctaggcaatagagtgagaccctgtctctaaaaaaaaaaaaaaaaaaatggctcagccatcccaagctgctcccagctgcctgcccctctaggtggcccccactactggcctgaggatgcactttatccccgccagggcctgaggagtcctggggaaaggtacccaagtctagtcctcaggagaagccgcccagggagcactagggcccgaggaagggttcaacctcgagactccatagcccctgggctcccgtccccagaaacaccagttacgagcagggggctggccatggtgtgaattcatgacctgcacacctcttgccgtaatgactaagtggctagagcttcaggctgccccactgctgccctctggagctcgagcaggtgcaggtgtgggtgcccaccctggcttggcctcttctcacctgggtggcttcggacacagggtggactcctcaaaggggctgcttcccatctgagaagccagcataatcctccaggggctactgatatacacacgctgcccctggtcctgagttagatcaccctgcccctagggagggcttgggggcttcactgctgaagttcagactccagggtggtccttgtcctgtgtgcctcagtttccccatctgtaaaatggatggtcctggggctgagcctcagtgctgcagggactagtgtggaaccctgtgtcctggtgcctgaaaccttactcccacctcagcagggctgggctgagccatcagcaagcctctggccggcctccatcattcaggaaagagccggtggctgaaggcacagctctcagagggagaacaaacgggggcgggggtgggatgggggcggggccggaggccaccggcctcaggctgtcctgggcatccagccagtgctgggcagtgagtcaggggccaggcatgtggagtggggcctctcccagccccggagatcaggcacctcccggaacccgcctgctgggcccccaccaggccgcgttcctctcccactcgctctccccatagaggggaccctggacctgcctgggggggacgaggatggggatgtggctggtgggcacagggcctctctgagccccggcacaggccgcctgatgggaccgtctcttccttggggaaactgaggcccaggttgctggggtggaggggatgtggagtgacagggcagggcaatggctcctcggccccctccgggaacaaagccaggtcattcctgtggggagggagcgccaaccccagggttggggggggcacgggccctgggtcaggggtacagataagcctgggctcccagaacccttgtcacagcggcacccctgccccatgcctgctttctctccagggcactcagagctgcagtttgcaggacgagagggagacgtgcccaatccccccatcccaggacgctcagccgtgcgtgggctgggcccactccactcccggcgcccacagttgccccagtgaaccggccagtggaggcatcctgtcccgtgtgcgggaaaggaatgaccgccaaggtgacagcagcgcttagccaaccctggcgctgacacctgacttgcaaactgctccctgcctgaggcttcaaggcaggcgagaggctttgtgtgtgtgacttcctccccgaagggacactggcaacagctggagacatttcctgttgttaaggctgagggggagctgctggcatttggtgggtggaggccagggatgacgttaactgttctactacgcccaggacagcccccaacacacacaacagcctggcccaatgtcacgagagctgaggtggaacagccctgttctgcttcaggtcttcaggtctttgggggtcaaggatgcaaatagaggactctgctcccaattcagctcacataaaagaaccggccgggcgctgtcgctcatgcctataatcccagcgctttgggaggccgaagtgggaggatcgcttgagcccaggagtttgagaccagcctgggtaacatagcaagatcccatttctacgaaagtacaaaaattacctgggcacggtggcatgcacctgtagtcccagcggcttgggaggctgaggtgggaagtttgcttgagcccaggaggttgaggctgcagtgagccgagatcatgccagtgcactccagcctcggcgacagagttagactctatctcaaaaaagaaaaaagagagaaaacccaccaacttggaaaattaaaacagccccaagggcatctaggaacagttaactgcacatctaaacccaggcccgccgttcttagaagctctgcaagctgcatggactgactcctgacatttcagggctagactcaaaaatccctttaaaaaaattttgtttctgagacggagtttcactcttgtccaagctggagtggaatggcacgatctcggctcactgcaacctccacctcctgggttcaagtaagtctcctgccacagcctccagagtagctgggattacaggtgcccgccaccatgcctggctaacttgtatttttagtagagatggggtttcaccatgttggccagactggtcttgaactcctgatgtcaggtgacccacctgccttggcctcccaatgttgctggtactacagacatgagccaccatgcctggtctcttcttttttttttttttttttttttttgagacagtctcgctctgtcgcccaggctggagtgcagtggctcgatctcggctcactgcgaactctgccgcctgcgttcacgccattctcctgcctcactcagcctcctgagtagctgggactacaggtgcccaccatcatgcccggctaactttttgtatttttagtagagatggggtttcaccgtgttagcctggtctcgatctccagaccttgtgatccgcccacctcggcctccctaagtgttgggattacaggcatgagccaccgcgcccggccccctttttttttgttgttgacacagggtctcacttcgtcccctaggctggagtgatgtggcgcagtcgtagctcaccacggcaacttcctgggctcaagcgatcctcccacttcaggccccgaagtagcgggggatacaggcaggcaccaccatgcccggctaatttatttttttcttagtagaggtggggtttcgcaatgttgcccaggctggtctcaaattcctagactcaagtgatttgcccgcctaggcctcccaaagtgctgggattacaggcatgagccacaacagctggcccctttctaagacagggtctcattctgtcacccaggctggagtgcagtgacactaccatggctcactgtagcctcaacctcccaggctcaagtgatcctcctgcctcagccgcccgagtagctgggactacaggcaagcaccaccagacgctgttaaagcttactgttccctctgcctaaaaacgcccctctctgattaagaactgcacttaagttcagtcgtggaaagggacatgatgaaacccaagcccaagttcacggaactaacacattcaagggcaaagctgtatctggggacaactgtcagtgggacccaacctccctctctcctccctcaggcaggcaggtggtgtgcacgcctcctttccttagcggtacccaaaacaccgaggatgggagagtgatgaacacattgattggccggccctggactggagtacatgttcagttagggtttattttggtatctgtcatagaaaacccccaaaaccagcagcttacacaaggtagaagttgagattggttctccccttctctctcccatttaaataagtttgtgctgatatctggctctgccatcatcagggaaccaggctcctgtcatccctaaaggacggcactcgtctgtacacgtggcagtatggctgccagggctccagccatcacacccacattccaggaaataggaagggggaagaaagggtgtatttgtcttttaagaatccttctagaagtgtcatgtaacatttccacatacatttcactggccagaccttaactataagggcagctgggaagtgttgtattttaactcccaaagtgctaggatcacaggcatgagccaccacaccaggccaaattttttaatttttttgtagagatggggtcttgccatgttccccagtctggtctccaactcctgggctcaagtgatctgccggcctctgccttctacagtgctgggattgcaggcatgagccaccacacctggcctccttatctttttaagtcccggcacaaaagtcgcttctgtcctccatgaagcctgcacactctggtgtggctcctgtcgcaatctggacctctctccagttctagagtgttgtctgcttttgtgttaattcctccgtcagcagtgggaggagaaccatgtcactcgtatcttgtctctctggtgcctagcagagtctgggcacaccgtggcactcaaacataccccctgaatgagtaagggccaaccttgaagtacctgggagctgtcatcgaataccacggtgtcatttgtcccatcccgtcacagatgtgaaactgcaggcctggcatagataagtcgactcccgttggttacctagctgaggccactctaggagctgaggccgaaaatcaggagaaaaagaaatccagtaaaaaaaaaaaaaaaaaaggccaggcgcggtgactcacacctgtaatcccagcactttgggaggccaaggcgggcagatcacaaactcaggagatggagaccatcctgtctaacatggtgaaaccccgtctctactaaaaatacaaaaaattagctgcgcatggtggcaggtgcctgtagtcccagctactcaggaggctgaggcaggagaatggcgtgaacccgggaggaggcggagcttgcagtgagctgagatcgcaccactgcactccagcctgggcgacagagtgagactccgtctcaaaaaaaaaaaaaaaaggaagacgtctagctgggcacgatggctcacgcctggaatcctagcactttgggaggccaaggcgggcgggtggatcacctgaggtcaggagttcaagaccagcctgaccaccatggtgaaactccatctctaccaaatacaaaaaattagctgggtgtggtggcgcatgcctgtaatcccagctactttggaggctgaggcaggagaatcgcttgaacccaggaggcagaggttgctgtgagctgagattgtgccattgcactccagactggacaacaagagtgaaactctgtctcaaaaaaaaaaaaaaaaagatctatgtccccacatttcatttgaaatggatctgaccacggcagatgcccgctgggtgcaagacgcagccacgaggctcctggctaccactcggtgtccaccagactccagaggtagtcgctgatgaatttcctggagagctgggtgctgtccaggtggatgggctgggccacactggggccatgatggactgaggcacagatgtaaggaaagcccgggacacacagcccctcacacaaccccacggggaaaaggatactgcctttactttttttttttgagacaaagtttcattctgtaggccaggctggagtacagtggtgcgatctcggctcattgcaacctccacctccagtggttaagtgattctcatgcctcagcctcctgagtagctgggactacaggcatatgccaccacgcctggcctcaggtcttctgcccacctcggcctcccaaagtgctgggattacaggcgtgaggtaccacacttggcctgctatactttactatatttattatagacgtggggtctcactgatacccaggctggtctcaaactcctggcctcaagtgatcctcccacctcagcctcccaggtagctgggacaacagatgcacgccaccacacccggctaatttttacagggtcctgctatgcaccattttatgtccctacctacagtgcacaagggttaaaatggctccccaaaaaggatactgcctttgaccatccctggctcacactcataatcccactcaattttactaacttggtggtaaagttgagccacgtacctgtacaggaagacaaaaaaaaaaaaaaaaaaaaaagaaagttacccagcaccaacttcaaccaagagccggactgcacaaggaggcacaggcaggcacacgttttggcagaacctacacggccgaggggattgtgactgtcgtgtcctcgtcgacctccttctcctgtcgctccagatccgcctcaatctccttgagctcttccagctctctggtgagctgagtagggcaggtcgttaaggaccccggctttcgagagagggctgcccctgcgctaactgcagctgggaggcccagggtcttggctctatttacgcacactctcttctttgagtcagagttttgctttgtcacccaggctggagtgcagtggcacgacctcagctcactgcaacctctgcctcccaggctgaagtgattctggagcccctgcctaccgagtagctgggattacaagcacacaccaccatgccctgctaatttttgtatttttagtagagacagggtttcaccatattggccaggctggtctcaaactcctgacctcaactgatctgtctgcttcggcctcccaaagtgctgggattacaggtgtgagccaccgcgcctggtcttttcttttttttttgagacagggtcttgctctttcacctattctggagtgtagcctcaatctcccaggaccaagtaatcctcccacctcggcctcccaagtagctgagactacaggtgtgtaccaccatgcccagcttattgattgattgattgattgagacagagtcttgttctgttgcccaggctggagtgcagtggcatgatctcagctcactgcaagctccgcctcctgggctcacgccattctcctgctgggaccacgcccggctaatttttttttgtatttttagtagagacggggtttcactgtgttagccaggatggtctcgatctcctgacctcgtgatccacctgcctcggcctcccaaagtgctaggattacaggcgtgagccactgcacctgacctaatttttttatttttgtagagacggggtctctgttgtccaggctggtctccaactcctgggctcaagtgatcctcccacctgggcttcccaaagtgctgggattacaggcttgagccactgcgcctggccctatgcgtgttttctagcaaggctgatcccctagcagaaaaggatataggaggctggccttcagacgggtgtcctcctccccagcctcctgaagcccagcttccagctgctgcagctccacgcctccctggtgcacctgctccttcgcattgagaaggctctgggccacttccttctccatggtgaggatctctgcagggtggagagaagcaggctccctagggtctgtccttccccaaggagagcagagagaaggtggttccacttgcctccactggcaagaaacatgccccttgtctgcagccctgtgtccagagagttctactggcaacttgtacaactactgtttcaccaaaacacatttaaatacactaaaaataaagcctcgtccttcacacacctaaaatataacaaaatagttggccaggcatggtggctcatgcctgtaatcccagcactttgggagcctgaggcgggaggatcgcttgaggccaagagttcaagcctgggcaacatagggagatcccatctctacaaaactaaaaaaaattaggctgggcatggtggttcacacctgtaatcccagaactttcggaggccgaagtgggcagatcacctaaggtcaggagtttgagaccagcctggtcaacatggtaaaaccctgtctttttttttttttttgagacggagttttgctcttattgcccaggctagagtgcagtggcgcagtcttggctcactgcaacctccgccttccagtttcaagtgattctcctgcctcagcctcccaagtcactgggattacatgcgcctgccacgacacccagctaattttttgtatttttagtagggacggggtttcaccatgttggtcaggctggtctcaaactgctgacctcgtgatccacccgcctcagcttcccaaagtgctgggattacaggcgtgagccactgcgcacggcaaccctgtcaatattaaaaacacaaaaaattagccaggtgtggtggcaggcgcctgtaatcctagctacttgggaggctgagacaggagaatcacttgaacccaggaggtggaggctgcagtgagccgagatcgtgccactgcactccagcctagggggctgaggaaactccatctcaaaaaaaaaaaaaaaaaaaaaaaggctaggtgtggtggctcatacctgtaatcccagcgctttgggaggcccaggcagatcacctgaggtcaggagttcgagaccagcctgaccaacatggagaaaccccatctctactaaaaatacaaaattagctgggcgtggtggtgcatgcctgtaatcccagctacttgggaggccaaggcgggacaatcacttgaacctgggaggcggaggttgcggtgagccgacatcgcgccattgcactccagtctgggcgatagagcaagactccatcttaaaaaaaaaaaagaaaaaaggctactggtggctgggcacagtggctcatgcctggaatcccagcactttgagaggccaaggcagaaggatcacttggacaggagtttgagaccaccctgggctatgtggcaaaaccccatctctactaaaaacacaaaaaattagctgggcattgtggtgtgcacctgtagtcccacctacttgggaggatcacctgaaccagggaggttgaggctgcagtgagccataatcgctgtcactgtgccactgcactccagcctgggtgacagagagagaccctttctcaaaaacccaaagcaaaccaaaataaaacaaagatggctactgttccttcctagaaacctgccaactcagagaatgcagattaaatgcccaggccaggcgcggtggctcatgcctgtaatcccagcactttgggaggccgaggcaggtggatcacgaggtcagtagatcgagaccatcctggctaacatggtgaaaccccgtctctactaaagatacaaaaaattagctgggcgtggcggagggcgcctgtagtcccagctacttgggaggctgaagcaggagaatggtgtgaacctgggaggcggagcttgcagtgagccaagatcacgccactgcactccagcctgggcgacagagccagactccgtctcaaaaaaaaaaaaaaaaaaaaaatgcttcccaaagggcccatgtttaagttttagaaacttacattatttttaatcagagtatgacatgtatatggttctgcaaacatgaacacacacgcacacacccttctccaagcctctccgtccctctgaagcagccactttcaagttttagctgttttctctggcactggcctccacatttctaagttaacttgcttatgctgctatttcttgatcggtctggttcggatggggcctgctgatttcctgttaggacagctgaggctctggctggctcacacagccttcccacccgctgtctgtccgccctcccgaaggacaaccaagtcttcttgaattcttccctgagtagtaatctctaccccatggctgttcattataaggtgctcctacctgacatattctcacacagctgaggggatactttttttttgggggggggggatggagtcttgccctgtcatccaggctggagtgcaatggcacggtctcagctcactgcaacctccgcctcccaggttcaagtgattctcctgcctcagcctcctgagtagctgggattacaggcacccaccaccacgcctggctaatttttatatttttaccggagacggtgtttcaccatgttggccaggctggtctagaattcctgaccttgtgatccgcccaccttggcctcccacagtgctgggattacaggtgtgagccaccgcaccaggcctttttttttttttaaacttttattattatttttgagacagtcttgctctgttgcccaggctggagtgcagtggcatgatctcagctcactgcaacctctgcttcccaggttcaagctattctcctgcctcagactcccgagtagctgggattacaggcatgcaccaccatgcctggctaattttcttatttttagtagagatggggtttcaccatgttggccaggctggtcttgaactcctgacctcaggtgatctgcttgcctcagcctcccaaagtgttgggattacaggcatgagccactgtgcttggcctatttttttgagacagtcttgctttgtcatccaggctggaatacagtggtgtgacctcagctcactgcagccgccacctcccaggttcaagcaattctcctgtctcagcctcccgagtagctgggattacaggcatgcgccacaacggccagctaatttttgtaattttagtagagaccaggtttcaccatgttgaccaggctggtctttaactcctgtcctcaagtgattcacccacctcggcctcccaaaatgttgagatgagaggcgtgagccaccacacccagcctgagggtgtactttaactcctctgccccacatctgtgacatgaaaaacaggtccagagacagaagttcagtgactcgcccacaggtacatagctccaaacctaggatgtgaactggatctgtttgacccaaagcctaggatccctggatcctgattctcagttttcttggccccagattcatccattctgctaacagccaggctggccgagtcacatctttctcctcaagccatcaaaggagggggagttaatggaggggtggaagaaggaggagggaaggagggaagagcctgcttgggacatcacattcaggataatattcagactcctcctgggcactctccaggcctggcagtcaggcggctgctgagctcatcttctgcttgccaagttcattctcacctcctgacctttgcatttgcaatccacgctgccaggaacaccgttcctgagccaccccgtggactggctccataggccaatcaaggctcagcccaggcctcctcataaaatgtgactgtataaggcacctgaaacccctggcactgcagctgtcagggagaaccgtatggcggttcctcagaaatcaaactttgaattaccatttgatctgcttctggctgaatacaaaaaagaactgaaaatagagtcttggctgggcgtggtggctcacgcctgtaatcccagcactttgggaggtcggggcaggtggatcacgaggtcaggagatcgagaccatcctggctaacacggtgaaactctgtctctaccaaaaaaaatacaaaaaaaaaattagccgggcgtggtggcgggtgcctgtagtcccagctactcgggaggctgaggcagaatggtgtgaacccgggagacggagctcgcagtgagccaagatcacgccactgcactccagcctgggtgacagagcgagactccatatcaaaaaaataaaaaaaagaaaatagagtcttgggctgggcgcagtggctcatgcctatattcccagcactttgggagaccgaggcgggcggatcacgaggtcaagagtttgagaccagcctggccaacatggtgaaaccccatctttactaagaatacaaaaattagctgggcatgttggcacgtgcctgtaatcccagctacttggcaggctgaggcaggagaattgcttgaacccaggaggcataggtcgcagtgagcagagatcacgctgctgtactccagcctgagcagcggagtaagactgtcctgggaaaaaaaaaaaaaagaagaaaatatggctgggcacggtggctcatgcctgtaatcccagcactttgggagtccgagacgtgtggatcatgaggtcaggagatcgagaccatcctggctaacacggtgaaaccccgtctctactaaaaaaatatatataaaaatattagccgggcgtggtggcgggcacctgtagtcccagctactcgggaggctgaggcaggagaatggcgtgaacccaggagacgcagcttgcagtgagccaagattgcgccactgcactccagcctgggtgacagagcaagactccgtctcaaggaaaaaaaaaatacagtcttgaagagatatttgggcacccgtgttcatagcagcgttattcaacacagccaaaaggtggatacaacccaagtgcccatggatggatgaatgaataaacacaatgcggtccatccttctatatcatgaaatatgactcagctttaaaatggacggaaattctggccaggcgtagtggctcacccctgtcatcccagcactttgggaggccgaggtgggcgatcacttgaggctgggagtttaagaccagcctagccaacatggtgaaaccccatctctactaaaaatacaaacattagctgggcatggtggcgcataagtgtgttctcagctacttgggaggctgaggtgggaggatcacttaagtctgggaggcagaggttgcagtgagccaagatcacaccactgcattcaagccagggtaatggagcgaggctctgtctcacagtaagtacacaaaatgaaaggaaattctgatacaggctatgacatggatgaacctggaggacattatgctccatgaaataagccagacacaaaagggtagatattgtatgattccactaggaagggtagatattgtacaattcctcgtaaggttcctagaggagtcaaatttgagacagaaagtagaaccctggtgggtgccagggtctgagaaggggatggggagtgagtgtttcatggggacagagcttcagtttggaaagatgagaaagttctggagatggatgatggtgctgatggttgcacagcagtgtgaatgtgcttaaggccactgaactgtgcagttacagatagtgaagatgggccggacacagtggctcacgtctgcagtcccagtactttgggaggctgaggcaggcagattacctgaggtcaggagtttgagaccagcctggccaacgtggtgaccccccgtctctaccaaaaatacaaaaattagccgagtgcggtggcaagcgcctgtaatcccagctactcaggaggctgaggcaggagaatagcttgaacccgggaggtggaggttgcggtgagcccagggcctggcagcagcagatgctccataaaacatctgaatgccttcaggaagaagggatgggctattgtcacaaccatttgacaaggaaggaagctgaggcacagagaatttaagaaactcacctcaagtctcacagcggacatggggatgggtgctaggattcaaacccggagctttgactcctgagccccagttcaaaccctgagacccccagctcctgctcacggagagctcagaaggggccaacccctccagactcctatatttaccactaaacccctggggggtgggggatggttgctgtcataaagccgatttctcagatggtgaaactaaggctcagagggggccgtcccagggggcatagggcaggagatgggagagtccaggagagaaggggttttgaggtgggcctggtcgccccctcccagcacccgggccccttcccccgtgggcccgcgaccacgctccgaccctcacctcgcagctgcttctcggcaccgtcttgcgtttccagcagccgctccaccacctgctcgtggcgccccagcagccgtcgctgctgcgcctccgcgcggttggcgcccagcaggctgagcagcccctggctcacctcctctatgtcgcggaaggcggccatgactacgccaggctccaacccgcgcaaatttgactgtccgcggggcccgccctcttccagaagaggttgctttccattggattttttgatacgtcagtcataagcaatggccaataggcatggggaacaggatcttagactgggctaagccgcctttggtctggcctggtgcgcctgcgaccactcctccgtcagtcatcggtgatgaccaatcggcgcaggaagggggaggctccgttatccttcccgatgcgcctgcgcgggagagaaagcggctgtttatttctccataggtcgagcgcttgctctgtgcagggtggggttctaacggcaaagcagcgagcagcttctcctggaacttacatcctacagtgtgtgcgtgggatacacaataagcatagagaataagtagattctatgagaggctgcatagcaaaatggcgtctgcagccagatttactgggttcgaatcccagcgttgccacttactagctgtgttaccctggacagacttcacctctctgtgcggtactttcctccttagtaaaatgagggtcatactagtgcctgtgtcagcgttggcgtgagaattcttcttattactttttttttagagacaaggtattgctctgtcacccaggctgaagtgcagtgccacaatcatagctcattgcaacttcgacctcctggcctccagcaatcctcctgcctccgcctcccaaagtgctgggattacaggcgtgagccaccgagcccagcctggcgtgatagtgtctcctattcagtaggtgctatatagttgtttaatgaaacatacatagaatcctagcatgtagctgggtgcagtggctcacgcctgtaagtctgagctctttggaaggctaagacaggaggatcgcttgagccctggagtttgagactagcctgtctcaaaacaaaacaaaacaaagaaaagatcagtgctgactctaaggtgctggttccatgctagacactggtatttctgcaagaaacaagatgttaagatggcatctttttttctttctctctctttttttttaagacagagtctcactctgttgcccaggctggagtgcaaggcattccagcctgcttcctgggttcaaggcattctcctgcatcagcctcccgagtagctgggattacaggtgcccgccaccgcacccagctgattttttgtatttttagtagaaacggggtttcattatgttggccaggttggtcttgaactcctgacctcgtgatctgcctgcctcaggctcccaaagtgctgggattataggcgtgagccaccgcgcctggcgtggcaacatttttatgtgtgctaccacctaaagaacatctcattgctttcctatgatttttttttcttttcttttcttttcttttttttttttcttgagacagagtttcgctgttgttgcccaggctggagtgcaatggcgcgatctcagctcactgcaaccaccacctcccaggttcaagtgattctcctgcctcagcctcccgagtagctgggattacaggcatgcgtcaccatgcccagctaattttgtatttttagtagagacggggtttctccatgttggtcaggctggtcttgaactcccgacctcaggtgatccacctgcctcggcctcccaaagtgctgggattacaggcgtaagccactgtgcccggccttcttttcttccttcttttttttttttttttttgagatggggtcttgttctgtcccccaggctgaagtgcagtggctcaggtgatcctttcatttcaaccttccaagtagccgggactacaggtgtgtgtcaccctttggtgcctgagagcatggcttcttgaaccagctgtgtaatgttggcatagacctcacttctttgtgcctaaaggcagtgaataacaattaggcagagtgaaatcaagaggggaaaagacttcaggttcactttctgatgctgcagcttacctgtgaccttggcaggttcctaacctttctaagccatagtggctaaagatagccctttcttattagctgccaggaggtgtcccagagataagccaggcaagattgtgcaactcgagcctgatagatctaaaggctcctgtggaaaaatgccacccgcccacctcccttccaaaaaagcaaagcgagaaccgcttcccagccattaggatggctactgtccaaaaccaaccaaccagccaagcaacctggaaaataacaagtgttgaccaagatgtagagaaattggaatgctgtgtacccttgctgagaatgtaaaatggtgcagctgctgcgggaaacagtatggcagttcctcaaaaaattaaaaatagtattaccatatcagcaattccacttctgggtatagccccaaaagaattgaaagcaggttgttgggccgggcgcagtggctcatgcctgtaatcccagcactttgggaggccggggcgggcggatcacctgaggtcgggagttcgagaccagcctgaccaacatggacaaaccccgtctctactaaaaatacaaaattagccaggcgtggtggcgcatgcctgtaatcccagctactagggaggctgaggcaggagaatcgcttgaacatgggaggcggaggttgcggtgagctgagatcacgccattgcactccagcctgggcaacaaaagggaaactccgtctcaaaaaaaaaaaagaaaaaaaaaagaaagaaagaaagagaaagaaagcaagtcatagagcagatatttgcaagtctatgttcatagcacccattatagcgaaagggtggaaacagcacaagtgtccttagatagaagaattaataaaacgtggttcatctctacaacacaattgtttttttttggttcatctgtacaacgcaatttttttttttttgagccaccatgcccggacacaatttttttttctttttcctttttttttttatgagacaggatctctctgccaggctggagtgcagagacgcaatcatggctcactcaacctcctgggctcaagcaatcctccaactttagcctcccaagtagctgggactacaggcacatgccactacacccagctaattattttttttttcctagagacaggggtctcattgtattgcctaggctggtctccaactcctgggctcaaatgatcctcttgcctcagcctcccaaaatgctggcattacaggtatgagtcaccgtgtctaccatgtctggcccataggacagaagattattcagccttaaaaaggaaggaggccaggtgcggtggctcacgcctgtaatcctggcactttgggaggccaaggcgggcggatcacgaggtcaagagattgagaccatcccggccaacatggtgaaaccccgtctctactaaaaatacaaaaattagctgggcctggtggcacgtgcctgtagtcccagctacttgggaggctgaggcaggagaatcgcttgaacctgggaggtggaaggtgcaatgagtcgagatcgcaccgctgcactccagcctggtgacagagtgatactctgtctcaaaaaaaaaaaaggaaggaaatgctgaccaggtccagtggctcacgcctgtaatcccagcactctggtaggctgaggcaggcagatcgcctgaggtcaggagttcaagaacagcctggccaacatggcaaaaccccgtctctactaaaaatacaaaaattagccaggcatgatggtgcacacctgtaatccctgctacatgggaggctgaggcaggagaatcacttgaacccgggaggcggaggttgcagtgagatgagatggcgccactgcactccagcctgggcgacaaggagcaaaactccatccccaccccgcaaaaaaagaaaggaaattctgacacatgccacgaggtggatgaagacatgttcagtgaaataagccagatacaaaaagacaaacactgcgtgattccacttagaggaggtccctagagtcgtcagattcataaaaacagaacgtagaatggtgggtcccgggggctggggaggggtatggggagtgagtgtttcatggggacagagtttcagttttgcaaactgagaatgttctggagatggatggtagtgctggttgcacaacagtgggaatgtgcttaatgccgttgaactctgcactttaaaatggttaaagtcgtacattttatgtcatgtatattttaccacaattaaaattaaaaatatactaaaaaaaaaaagcaaagcaagaaactgtgtgatggcgggaataggtcttaaaggtgagctgaacaagagaagtaaagataatgacaaatggtcctggcaatggctttgtgagaaagtttatttcctaagaacccttcttggctcacaaagccagaggaaactgacacgagtaatggaccttctgcctagaaatacactccttagcataacatttctgggtcttccaaaaaccttctgttatctcctgactgaacagcctagtggataaacagaggaaatgagaagtcaggagatatgattaccgctgggagatctgaggggaggggcccgtgggctgctagggccaatgatattccttttccagttctggtgccggcaacttgggggtgccgtttgcaaaaaagccatggaaggaactgtacacttttgtgcaccatttgtgcacagaatgtattcattttatacctgaagaaaaaagaactgtaaaaaaaaattaagaccaaatatattagaaaaagatttggtaggagatgctccaaactgttgacaatggtattcctaccaagtgggattatggcatgctgcaaggactaaacactgctgtattgtttgaatttttatttttatttttagatggagtttctctcttgttgcctaggctggagtgcaatggcgtgatctcggctcaccacaacctccaccttccaggttcaagcaattctcctgcctcagcctcctgagtagctgggattacaggggtgtgccagcacacccggctaattttgtatttttagtaaagacaaggtttatttttttctttttgagatggagtctcactctgtcgctcaggctggagtgcagtggtgcgatctcggctcaccgcaagctccgcctcccgggttcacgtcattttcctgcctcagcctcccagtagctgggactacaggtgcccaccaccacgcctggctaattttttgtatttttttaagtagagatggggtttcaccgtgctagtcaggatgatctcgagctcctgacctcgtgatgtgcccgccttggcctcccaaagcgctaggattacaggcgtgagccaccactcctggccttttttttgttttttgagacggagtctcactctgtcacccaggctggagtgcagtggtgcgatcttggctcactgcaaactctgcctcccgggttcacgccattcttctgcctcagcctcccgagtagctgggactacagacacacgccaccacacccagctaattttttgtatttattagtagagatggggtttcaccatgttggccaggatggtctcgatctcttgacctcgtgatccacccgccttgacctcccaaagtgctgggattacaggcgtgagccaccacgcccggccagagacagggtttcgccatgttggtcaggctagtctcgaactcccgacctcaggtgatccacccgccttggcctcccaaagtgctgggattacaggcgtgaaccactgcacccggctcgaattttaacttttttttttgagacggagtctccctgttgcccaggctggagcacagtggcacaatctcggctcactgcaacctgtgcctcccaggttcaagcgattctcatgcctcagcctcctgagtagctgggattacaggcgtgtgcaaatgcacctggctaatttttgtatttttagtagaggcagggtttcaccgtattgatcaggctggtctcaaacttctgacctcaggtgatgcccaccttgacctcccaaagtcctgggattacaggggttagccactgtgcccggctgaattttgacttttataataaatcgctataaattatttggcattagaatacaaaagtcaccgaagagccaagttttaggccaggcatagtagttcatgcctacgatcccagcacattgggaggctgaggtggggagatcgcttgagcccagaagtttgaggccagcctgggcagcatagagagactccgtctatacaaaaaataaaaaaaattagccaggcatggtggcacacacttgtagtcccagccactctggaggctgaagtgggaagattgcttgagccccggaggttgaggctgcagtgagctatgatcgcaccactgcactctaccctggtgggcaacagagtgagaccctgtctcaaaaaaaaaaaagaaaagaaaagaaagaaaaagattgatttttttttcctgaggtgttcacagcaggtgttcaacaaaactttgtacgatggcaatattcagtatctctgcaagtcaatacagtagccaccaaccacgtaaagctatcgagaactaattataattcattgactttatttatttacttatttttgagttggagcctcactgtcgcccaggctggggtacggtgctgcaatcttagctcaccgcaacctccgttttccatgttcaagtgattctcatgcctcagcctccccagtagctgggattacaggcatgcaccaccatgcccagctaatttttttctatttttagtagagatgtggtttcaccatgttggccaggctggcctcaaacataaatgatccacctgcctcagcctctcaaagtgttgggattataggcgtgagccaccgcgccaggcataattcatttacttaagatttttttttttttttttagaaacaaggtctcactctgtcaccaaggctggagtgcagtgggacaatcatagctcactgcagcctcgaactcctggcctcgagtgatcctcccacccgcctcagcctcctgagtagcttgggactacaggcacaagccaccaagcctgctaattataattaattaattcattcattcatttatagatggagtcttgctctgtcacccaggctggagtgcagtggggcaatctcagctccctgaaacccccgcctcctgggttcaagtgattctctggcctcagcctcccgagtagctgggactacagatgcccgctaccatgcccagctaattttttgtatttttagtagagacagggtttcacgatgttgcccaggctggtcttgaattcctgacctcaggtgatccacctgcctcagcctcccaaagtgctgggattacgggcgcgagccaccgcgcccggcctcatgtacttttaaatgaaaatagccacatgtagctagcggctacactattgttgggtgctggtctaggacagagcatgaaggtgtttactgtgatattcttgcaactgttctgtagctttgaacactctccaaaataagtccattttgaaaaagagatttgcagcagctcacgtgtgtaatcccagcactttgggaggccgaggtgggagagtggcttgggcaacatagcaaaaccccgtttctacaaaaaatttaaaaattagtccaggcgcagtggctcacgcctgtaatcccagcactttgggaggtcgaggcgggtggatcacttgatcaaggtcgggagttcaagactggcctgaccaacatagtgaaaacccatctctactaaaaatacaaaaattagctgggtgtggtggtgggtgcctctaatccaagctatttgggaggccgaggcaggagaattgcctaagtccaggaggcggaggtttcggtgagcctaaatcacaccactgcactccagcctgggagacagagggagactccgtatcaacaacaacaacaacaacaaaaagtcaggggtggtggcgcagcctgtggtcccagctagtcgggaggttgaggtgggaggatcgcttgaaccctggaggtagagactgcagtgagctatgattcgcaccactgcactccaacctgggagacagagtgagactctccaaaaacaaaaagtggtggctcacacctgtaatcccagcactttgggaggctgaggcgcgtggatcatctgaggtcaggagtttgagaccagcctgaccaacatagcgaaacccccgtctctaccaaaaatacaaaattagccgagtgtggtgggcacctgtagtcccagctacttgggagaatcgaggcagtagaatcacttgaatccaggaggcagaggttgcactgagccaagatcgcgccactgcactccagcctgggtgacgagaagcaaaactccgtctcaaaaaaagaaaaaagaaaaaaaaaaggaaagatatctatcttaaagcttaaaagggagcacagcgaaaaaagaaaagacacagaatcatcaacattattggtagctttattaaatttgtttaccttctaaaaaaaacgattacaaaaaagaatacttcatttaagtgtaatactggctttatggacgtaccgtgatcagaaagtgaaattaaagctcatggatatgcgtgagaagagaatgggcgcagaggcacgagtccagtatcccacggagagaaggaagtgtagagagatgcgtggacccatctcaggggtcacgcattcctgggccaaggagttgcttctaagagcttaaaataaatgcactggctggctccagggctggacacacaggcacagaactcttgtaccgcttctcaaagctgcccaaagctgcgaccttccccctcagacacccacaattaattgtttccaatcagctttggttttgttttctctgcaatttacatgcaaacaccatctatctattcatccatccatccatccatccatccatccatccatccatccatccatcctgcttgtctcctttgaccagccaagccctattttgttttacgtacattcccttcactaaaaatcaaagcaagccagtctacatcaagccaagaaacctacttttctaaggagagaaaccagtgctttgccttctttaatgaacctgcgagctctcagcgctttctcttgctgaaatgtggctttaaagccttggaggctgagctcactggcctcgaaagggcagcgcgcgtatttggtttggagcgcactcctgatcacaaagcacatttttagaggcttggaacccttccctttctgttgctcaccaaggaaaaggcacaagaaagacaatgatgtggagattcttaggggaccaaaacaggccatgaaggaaactgtgagtgtctctggcaagccccgtttcccgcaggctctgttccaggcagctccggaaagtctctaggttgttaaaaagcccagctggcccatgtttggttttcagcaaagccctgtctcttgaagtttgcgctgggaggcctggggacggccaacttttaatcgtacacacatggggtttttgggagccggccctgcgttttgccaacaagcgcatgccctgttttctttcctttgaggagagaaattctggagtcccggggaggaacaggacggccctgtgaccatagtctggggcctggcggcggggacgcagaagccaccctgagagccagattcttttcctgcgtcttcaggtctgaaggattttctaggaaaattaacatttgccaaggcctccatgtggggaagggaggggtttctgggtaatttgtctctttttcttttctttcttgagacagggtctcgctgtgtcgcccaggctgaagtgcaatggtgtgatcatagctcactgtagcctcgacctccagggctcagcctcccaagtagctgggactacaggcgcgcaccaccacgcctggctagtttttaaatttcttgtagagatgggtcttgctgtgttgcccaggctggtctttaacgtctaggctcaagctcaagctcttgccttgccctcccaaagtgctgggattacagacgtgagtcaccacgcctggccggtaatttctcattgtgaattgattgggtccctgtaagtcacagagcctgtcctgagtcccttcatctgaatgagggtgaaaagactgagttttctgtcccgggtgacaaggacagaatctgtcttgtgaaacaaccagaagaaaattcccctaagaaagccgtctagcggggcagtggacacaacactattctatatcagacaattaaatgtgggggatgaagggtgaaccccaactggtgcgtaataacacttaggattaaaatgaaaatatgcaagttccagtgactttcaaatctggcaacaaatcctaagattcccaccccctcctgcaacaatgattcaaaaatacaatatttttttcctctccctcttcctccatccataattaccagctgattgttctcaatgttcttcataaaacccacaccccagcatcagccctggcgccaatgtatacaagaattttgcttcggtctgcgctgtggccactttgaacaggggagccaagaaaacccacttggagctggagtcctgtggccgtcggggctcccccagggaagcagagggagagctcgcttgcctttgagccgtgggccttggggagtgtgagtggggtgggccagggaggaacgggaacagggaggagacggggacaagggacggtttgctcccggtctggctggtccccgcctccctcacggctactcttctgccgaggatgatgtagggctctcgtcatctgacattggggcaaactgaaacagagaagcagaattctttttgtttgggatcctttccaatcccccgaggcgccaacgtggtggctggcctggtagatatgatgggtaagcaggagggaggcgtggcccctggccccaaggaggtggcgatctgggggcaccgccttgaagaagcaaactcatgactgtggttgaggatgttcaccgggggtgagggatgcaaaggaatgagggtggacagtggctggtcagggagggtgagttctcagctgactgtgaacggcatcaaggagccagcgagcagggaagagcattccaggcagcggaaacagcacgtgcaaaggccctgggataagtgcagaggggtgtggcaataaggccagtgtggctagagggggagagaaacagtagtggggaaggtgagggtggttgtgcagggcctggtgggctttggagaggaccctggctttttcttttcttttttttgagacagagtttcactcttgttgcctaggctggagtgcaatggcatgatctcagctcactgcaacctctgcctcctgggttcaagtgattctcctgcctcagcctccttagtagctgggattacaggcaggcgccaccacgcccggctaattttgcgtttttagtagagatggggtttctccatgttggtcagtctggtctcaaactcctgacctcaggtgatccgcccatcttggcctcccaaagtgttgagattacaggcgtgagccaccgtgcccggcctagatttttttttgcttaaagacagggtcttgctctgttgccaggctggagtatagtggtccaatcatagctcacagtagccttgactatctgggctcaagcaatcctcctgccttagcctcccgagtagctgggactataggcatgcaccaccaggcccagctaatttttttttttttttgaggcggaatctcactctgtcacccaggctggagtgcagtggcgcgatctcagctcactgcaacctctgcctcccaggttcaagcaattctcatgcctcagcctcccgagtatctgggattacaggtgcccaccaccacacccagctaatttttgtatttttagtagagacagggcttcaccatgttggccaggctggtctcgaactcctgacctcaggtgatctgcccgccatggcatcccaaagtgctgggattacaggcgtgaaccagtgagtctggcctgaatgctccttaaacacgtcagacacacccctgcctcagggcctttgcactgcttgttcctgctgcccggaagaccatgtgattcactccctaacttctccaggtgttgactcaaatgtcatctcttctctgagggactccaatagcttccccatcactcgccatcccacgtccttgtttttttttttttttttttttctttgagacagagttttgctcttgttgcccaatgtcatgatctctggctcactgcaacctccacctcctgggttcaagtgattctcccgcctaagcctccagaatagctgagattaaaggcatgcgccaccacacccggctaatattttgtttttttagtacagatggagtttcaccatgttggccagcctggtcttgaaccccttatctcaaatcatccgcccaccttggcctcccaaagtgctgggattacaggcatgagccaccacgcctggcctctttctttttttttttcccagacaaggcggcactctgtcaccatgtagtgatgcaaccatggctcactgcagcctcaaattcctgggttcaggtgatcctcctgcctcagcctcccgagtagctgggagtacaggcatgcacctgtatttttgggggagacaggatctccctatgttgcccaggctggtctcgaactcttgggttcaagcaatccttccatctcggccccacaaggtgctgggattacagacgtgagccaccgcgcccagcctgattgtgtctcttaccagaatgctcactccataagggtggatactgttttctgttttgatcagtgctgtgaccactggggactacctagaactgggcctaacatgcagcaggcgctcaataaatatttttcaaatgagtgaatggtgactaagacacgcatttggaaccagacagacccaggcgtgaatactgttatgccaaccatgaccatgcagcctctctgtgactaatttcctcactggggcactatgaaggttcagcaagcagctgaccatattctgactttatccttagcgtgaaccccatgcacaatcagctcttcataaacatccgtctcctctggccaggcacagtggctgacccctgtaatcccagcgctttcagaggcagaagaggaagcatggcttaagctcaggtattcaagaccagcctgggcaacatagtgagacccagtctctacaaaagatgttaaaaaatgtccgggtgcagtggctcacgcctgtaatcccagcactttgggaggcagaggcgggcagatcacttgagctcaggagttcaagaccagcctggccaacacagtgaaatcccatctctactaaaaatacaaaaattagccgggcatggtggtgtgcacctgtaatcccagctactttggagactgaggcaggagaattgctcgaacctgggagatacaggttacagtgagccaagattgtgccactgtactccagcctgggtgatagaacaagactttgtctcaaaaaacaaaacaaaaaaaactcagccaggtgtggtgacgtgcgcctgtagtcccaactactcaggaggctgaggtgaaaggatcacttgagcccaggaagtggagtttgcagtgagctttaattgtgccactgcactccagccttggtgacagagtaagacccagtctgaaaacaaaaacaagaccaggcatggtggctcatacctgtaatcccagcactttgggaggctaaggcaggtggatcacgaggtcaggagtttgagaccagcctgaccatcatggtgaaaccccgtctctactaaaaatacaaaaattagccgggtgtggtggtgcacacctgttatcccagctactcaggaggctgaggcagcagaatggcttgaagccgggaggcggaggttgcaatgagcccagatcgtgccaccgcactccaccctgggcgacagagtgagactctgcctcaaaaacaaaaacaacaaatctctgtcctttcagagacccacccatcccgtgcctacccggccggattgagactcaccgagcacttgatgttcatgcgggaatacagcatggacgcaatctcactctgccctgcgtccaaggccaccatcagagctgtgctcccatcctgcaaagtatccggtgctatgaatgacgtccccatgctgtgctcccgccctccccggggtgcacctggttggagactcacgcgatctgtgagtgagatgtcacagctgggcacggccagcagcagccccgcgatctccttgtggccgtgctcacaggcgcacatgagggccgtggagccgtcatcatcttgcacgttgacatctgcctcacaggccagcagggctttgacaacgtccacccgcccgtggctgacggccagcatcagggccgtctgtcctgcctggggagggcaaggaacaggattatggttcatgcaggccccagggcaggacaccccctggtctagaacctgctgtagctcccacatactctgatggtgaaatgtaccctcaacttgctgatctcctcctgaatctcaaacaaccctcccgtcaccaggggagtaataaatccacagagacagaaagcggatgagtggttgccagaggctgggagaagcgggggcggaggaaatgatggatacaggtttcctttgggggtgaagagaacgttctggaactagacggaggtgttggttgcacaacagggtgaatgtatttcatgccagtagtgcttttggttttgttttgctttattttagagacagggtcttgctctgttgcccaggttggcgtgcagtggcacgatcgcagctcactgcagcctcaacctccccaggctcaggtgatcctcccacctcagcctcccgagtagctgagactacaggcatgcgccacaatgcctggctaatttttgtatcttttgtatagatagggttttgccatgttgcccaggctaattgttcctttaaaagggttaattatttttttttggagatggcgtctcgctctgtcaccaggctggagtgcagtggcgcaatctcggctcactgcaacctccacctcctgggtccaagcaactctcctgcctcagcctcctgagtagctgagattacaggcgtgtgccactacgcccagctaatttttgtatttttagtagagacagagtttcaccatgttggccaggatggtctcaatctcttcacctcgtgatccgcccgcctaggtttacaggcgtgagccatcgtgcccagcctaaaagggttaattctgggcactgtggcttacgcctgtaatcctggcactttgggaggccgaggtgggaggactgcttgaccccaggagttagagatcagtctgggcaacatagcgagaccatgtctctagtaaaaaataaaattaataaaatacagcctggacaacttggcaaaaccccaactctaaaaaaaaattagccgggcatggtgccgcacgcttgcagtcccagctacttggtggcctgaggttggaggactgtttgagcatgggaggtcaaggctgcagtcagctgtgattgcaccactgcactccagcctgggtgacacagtgagaccctgtctcaaaaaaataaaaaatagagataaaataaaataaaaagttagaaataaaggagttaatcttatgttttgtgaatttcaccttctttttttttttaatagagaggaggtgggggtgggggggtgtctctaggttccccaggctggtctggaactcctgacctcaagcaatttatcccgctttgttctctcaaagtgctggggttacaggcatgagccaccttggtgagcctcaccttaatttttttttttttgagatggagtctcactctgtcacccaggctggagtgcagtggtgcgatctcggctcactgcaacctccgcctcctgggttcaagcgattctcctgccttgagtagctgggattacaggcacatgccaccatgcccagctaatttttatatattttttttagtagagatggggtttcaccatgttgattaggctggtctcaaactactgacctcgtgatctgcccactttggcctcccaaagtgctgggattacaggcatgagccaccgcacccggctaattttttttttttttttttgagacagagtctcactctgtagcccaggctggaggacagtggtgcgatctcagctcactgcaacttccacctcccaggttcaagcgattctcctgcctcagcctcccgagtggctgggattataggcacgtgccaccacgcccagctaattttttaattttttagtaaaggcagggtttcaccatgttggtcaggctggtcttgaacttctgacctcaggtgatccacccacctcagcctcccacagtgctgggattataggcatgagccatggcgcctggccttaattttttgaaaatgaagccactaaaaaaatttcttggaaattaaaacaaaattaaatcaataaagataaggcaggatcatgcctgttatgccccgtcacagctccattttgttcctttgctgtcttcagactgttgacgatccctctcctcctcactgtcctcagtgggtcctggcttccctgctcttttgcccagacacctgttcataagccccagtcacctccacagtgcctgtttctgcttcccaacacacagctgaagggagcgctcaaaccaggaatcaggccacgccacttccctgcctaaattcccctggcggtttcctgcagccctgagtccaaactggcttgagtcccggtgctccctaaaatgcttatggcttgaagaacgggctagtgagcttcaggagaccatgcctgcttgttcgccatttcagtccccagttttcggcccagggaacccagctgctgctcaatgaactgtccagcaggatgtgggatggggtcatattaagaaaggtaaggaccctcatatcctctactccttctagtttccacaagaaggtcctgtgtcagagacagcctggccatgaagagcagggctctggagttagaccacctgggtttgggcctgtcactcagctgggatgtcataaagtaggaagagccacctggatctgcagcagccggggtccccatacctggctggctttggcattgatgttgccaagccggaagagctgaaggacagtctcgatgtcgtcctgggtcttcagggtggccagggcggtgagcataatagggctgtagccagcacggttctgtttgtccaccttgcagacacctaagagacatggtgtgaaccctcagaccagggatcgctgctagtggactgccccaaggaacgtggataccacgtctcgtccatcagtctaggcatgccctaatccctcccttttctcagaggaccccactctgccctagaggtctccatctccattagacctggggctcctaaagttggagacagttcctcctccatcagatttggggcccctgatgctggcatctatatttagggctgagaatagaaactgggtctcccctgttaattttggaacagccatttaccctcagactggcccatgtctcccccatcagattgtgggccctgagtccttcatcagcccgggaggctgtctcccccagtaggagagggaagggcaagtttcttactaactgaggaccacgtcttctttccaagccccagacttgaggacgcatccctctcttagaccagggctccagagatgtcacctccatcatgcaggcgtgttaggttcacacgtttccctaacatcacttctgccttttccattatgctggctaaaggtagggcccgtgcctcccccaccagactgggaaggaagtgtctcctccatcagactgggaggacagcatctcccccataagaccaggagggtagagtctctgctatcagactaggagagtcatgtctccctcgttagactgggaaggtggtgtctcactcattagactaggagggtggtgtctctgccatttgactgggaagacagcgtctcctctatcagactgggagggccacattcccccaacaatgaaccgggaagatgatgtctcctccattaaactaggcaggtggtgtctcctccatcagcctgggagggtggtgccccccccatcagactggaagggtggcatctcccatatcaaactgggaaagtcacatttcccccatcagactggggaggcagcatctcctccatcagactaggagggccacatccccaccacaatgaactgggaaggtgtctcctccatcagcctgggagggtggcatctcctccatcagactgggagggcggcatctcctccatcagactgggagggccatataccccaccccattgaactgggaaggtgccgtctcctctatcaaactggaaggctggtgtccctccacatccaatcggaaggtggcatctgccacatcagactgggagagaggtgttccctctattatactgagaaggccgcgtctcctccatcatcttccccatcagatggggagggcagtgtcttccctatcagactgggcatggcggacagctggctggtttagagccgcctcgtcctccccgctgggctcaccgctgtcgagcagctgctgcaccacggggaagttggcatgagacacggagtagtgcagggctgtgttgccgttgctgtcggcgatgttgaccacgtagtccagcagccgcgcagacatggcccggaacgtgaccaggtgccgccgcaccagctcggggtgtgcgtcgctgcggcaggccaggcgcagccactcctgcagcactgtggtgtaggccactttctgcatgcgagtcaggtgggagaggatgtgagggcgggggaggcccactgggacaccccccaccccagatgcgcccccggagcaaagcgtggtgcccttgtcctggaaaacgatctcaagggaagtgcagaccctcccaaagggaagtgtagacatctctgtcccaataagacccttggagtgaggtgtggactttgcaatccccaacacgttccccaaggaaggtgtgagcacctccaccctggatataatttctctctctctcttttttttttttttttgtgagacagagtctcgctctgttgcctaggctggagtgcagttacatgatcaggactcactgcagcctcaacctcctaggctcaagctatcctcccgcctctgcctcccaagtagctgggaccacaggcgtgcaccactatgcctagctaatttttaaaacaatttgtagaggctgagtgcagtggttcacgcctgtaatcccagcactttgggaggccagggtgagcggatcacttgaggtcacgagttcgagaccatcctgcccaacatggtgaaaccccatctctactcaaaatacaaaaaattagccagacgtggtggcacatgcctatagtcccagctacttgggaggttgaggcaggagaattgcttgaacctgggaggcagaggttacagtgagctgagatcgcaccactgcactccagcctgggtgacagagcaagactccctctcaaaaaaaaaaaaaaaaaaaaaaaaaaaaagaatttttttgtagaaatggggtctcactatgttgcccaggctggtcttgaactcctggcctcaagcgatcctcctgccttggcctcccaaagcaccaggatgacaggcatgagccactgcgcccagccctggttataatcgccaaagtcaagtgtagatgcccaaaaagggaaatctgggtgccccgcccctgaagcccccaggaagaacaggaacccaaggccaggcttggccagtgagtgttcatcctccagcctctccccatctccctggcctctctccgaggcccatgacttgagcaccaccacccccatgctctgggcttcagtgtcagggtccccactaggcaggagcaggaagtcactgaggatgaggagaggccacgggtggggtggaggtaggggtccggggggtggccaacctaggcccagggccagatcgtaccagctcccgctctgtgagggcgttgggattgtccaggtacttttccagggccaagcaggctgagatgaggtcagggcttagctccatcctgccaggaacagacaaagcggggaactaagtaagccccgctgcggtgcctgggaagggacttgacattctgcaccacgtcactcacaatagggtcacctgaatggtggcatctcagaccctccttcacccgggacacacatttacattgcaccccaaggggcagctgtggggaacatgcagacccccaagggagagtggacacacaagccaaagtttattccaaatgcccactggcagatggaaaatatttcccaagggcaaattttttcaccaggggaataaaaaagagacataaatagaacagacaggtagaggaaacgtcccaaagtaggtgggtgattttgggataaactttggctggtcccctaaatcctaaccccggcagcccaaaatagttccaccaggccctttagcaaagcctccagaacttcagatgcccagaaggagcaagtgctcgtttgctaattcagactaaagtgtgcatgactgataggagggtccttcaaagggcttgaacggtgggggtttgaggcagaggtcatccacccccggccctgcctgaatccctcctacccagaaaactgacctgatctcctcctccgtgtttgatcctgatgccccctcagcagtgggtatgtgctgagattctcgagacagctgacactcctgccggctggtcttggccgctgccgtccctgcaggcctgagctggggggcttcggccacactcggaaccctctccctcggctctggggcctcgttctctgtgctgtcgttgtctgagatgttctctgctgtgctggagtcctcggatgacgactcatacctggggaggaacgagcggggagggggagatgctgcaggtgggatgagaaatggtgggaaaggaaggcagggatctggtgatctgacctctgtgggcctcagcttccccatctgttcaatggcagtattgacattccagggttgtgggatgtggtttacagcaactggcacacagtaagcgctcaataaacattagcagtgattatgatcatgctcggggggaggggcactgcttttcacctcctgccttttgacacttctagcatactcaccctccttttttttttttttttttttgagatggagtcttgctctgttgcccaggctggagtacagtggcactcactgcaaactctgcctcctgggttcaagcaattcttctgcctgagccttccaaatacctgggactacaggtttgcaccactgtgctcggctaatttttgtattttttagtagagtcggggtttcgccatgttgccatgttggccaggctgatctcgaactgggtttacaggtgtgagccattgcgcacagccacctctagccatttttttttgagacggagtctcgctctgtcgcccaggctagagtgcaatggtgtaatctcagttcactgcaacctctgtctcctgggttcaagcgattctcctgcctcagcctcccaagtagctgggactgcaggcacccaccacacccagctattttttgtatttttagtagagatggagtttcaccatgttggccaggcttgtctcgaactcctgaactcaagtgatccacccgcctcagcctcccaaagtgctgggattacagatgtgagccaccgcgcccggccacttctagcccttttaacacaggtgattcagactcctgttccactgcaaatagggctctctcgtgtttcttgctggctctggacaaaacctaatcaagcttctaggctcggcattcaaggccccaaaccaaccatcactccctgcacctcccacttctcgtgtcactctgctttcccacctctgagcctttacccacgctgtgcccctgccagaagagccctccccacaccctctcttcaccttgctagctcctacttctcccgtaccacctgtgtctcctccttctgggactcccctagggccacctgtgtctttcttgaggacctgcaccacctgagtgttccccatcacggctccaaccacccatcagcacccagctccccactggaccaggagctctatcagggcaggaagcggcgtccggcaccttctgtggggtagagctgtgcagtggttacaccttgagctcttgagccagggcacgcagggctgactcctgggtcactgagtgagctccagaaatgcgcttagccttcctatgcctcagtttcctcatctctgtgttgtggtttgattaaacgaattaaccaaagcaaggagctcagaatgaggtaattaggaggctctcgtgcgtggatgaatggaggaggggcgggaagtatggggtggggggtggggtcttctcctctcacccgccgttgacccccacgaactggaggctcctccggtgggccgtggggtctgcaacctcctctttccgtttcatgatagatcgcacgcctgccgggggcccgcctggaggggaggacagcggaggtgctgtgagagtccttcagggccagactccgaactggcgccatcccggtgccccgtccctcttggcggccacccaccacttaccggtgcccccggcctcctcggactcttgggaggctgcttgcctggtgggctccctgtgggtgggctcctgggtgggcactcggcctgtgctcttctcaggctgtgtaagggaggctacctcggaccccgggggtgacgaagacgattcggcaggaacttctgggaggcctggagggacaggaaatgagtgtctgctcttggtcataaaagccaaaccaccacagccctgcgggtcatacaccctgggccaggagctgtaacagggctgatttttgtgttaccacatccagtcttcctgccccttggagggaaatcggattattacagatgaggaaactgaggcacagagctgccaaggtaaccccttgagcaggtggcagaatccagtttggtgcctgcccagcagctagtcagggacagggacaaccctgtggccccatattcctggctcgagcctgagtgatcgctaaaaataaggtttggccgggcacggtgactcatgcctgtaatcccagcactttgggaggctgaggcgggcgaatcccctgagatcagaagttcgagaccagcctggctaacatggtgaaatcccgtctccactaaaaatagaaaaattagccgggcgtggtggtgcacacctgtcgttccagccactcaggatgctgaggcaggagaattgcttgaacccgggaggcggaggttgcagtgagcagagatcacgccaatgcactccagcctgggcaacagagcaagaccctgcctctcaaaaaaaaaaaaaaatcagagataaaaacacgtcttggtggccaggcacagtggctcatgcctgtaatcccagtactttaggaggctgaggcgggcagatcacgaggtcaggagttcaagaccagcctggccaacatggtgaaaccccatctctactaaatatacaaaaattagctgggcgtggtggggggatgcctgtaatcccagctactcaggaggctgaggcaggagaattgcttgaacccgggaggcagaggttgcagtgagcagagatcacaccactgcactccagcctgggtaacagagagagactgtcctgaaaataaaaaataaaaaaaaaaaacacatcctgactaaaaaaacgaaacgaaacaaaagaaaacaaaagacaacaaaaaacacccacccaggttggtctgaggacaaaggtgacttcctggatgctgaggtcctggactgccagccaacagcgtggaataaaagtccagtttcctttttgtgtagccaccaatgtcttggaatccactcaggtccccctgggccacatatggctgctttgtaagacagggtttcactcccttcactgaagcttgagtgcagagatgcgatcttggctcactgtaacctgtgcctcccggattcaagtgattctcctgcctcagccccctgagcggcaggcagtaaaggcgcatgccactgtgcccagctaattttctgtaatgtttgtagagatggggtttcactatattgcccaggctggtcttgaactcctgagctcaagtgatccgccttccaaagtgctgggattacctccggagcagcaccgcccagcccatgcatggtttctgtgtcagcatttcctcgggggttccccttcctgtcccccggggcgccaactctgaagaccaattaatttgaattccctttaatggctaaaaaggttgttggggtttttttctttgtgacagggtcttgttatattgtccaggctgctctagaactccagagcgcaagggatcctcccacctcagcctctcgcatagctgggattataggcatgagccactatgcccagccttaaattttttttttttgccatatacagtgacttcctgaggcccacaggcaatattcaactttagtacagaacggtgaccaaatgctggacataggcaaagagtaacatagacagggccggctgcatgagacactcggtcatcggcatggccaacagcatccccagaccagggtgtggccagctcataccacagaaaacataaaaaccatgccagagccaaggcttgaactcatgagtggggaactgagcgagagcaaacgccagttgctatgtccctctatgatttttctttttaaacttggcaataaattcacgtgaaacaaacaaacatactgcatggccaggagacagattcacaatctcaatctctgcccaaaatgcagggcgcctaacttgaaatcctggagaggccgggcgcagtagctcacgcttgtaatcccagcaccttgggaggctgaggtgggtgggtcacttgaagtcaggaattaagagaccagcctggccaacatggcaaaaccccgtctctactaaaaatataacaattagccaggcatggtggtagacatttgtgatcccatctatttgggaggctgaggcaggacaatcgcttgaacccggaaggcggaggttgcagtgagccgagatcatgccactgcactccagcctgggggatagagcgagactcttgtctccaaaaaaaaaaaaaaaaaaaaaaaaaaaattctgggagagccaaaaaatgaggtggagcaatattatgctaagtgaaagaagccagatgcaaaagggacaaaaacattgcatgatttgattcacaggagttccctagagttgtcaagatttattattattattattattattattatttgatacagtctttctccatcgtccaggctggagggcagtggcgtgatctcggctcactgcaacctctgcctcccaggttcaagtgattctcctgcctcagcctcctgaatagttgggattacaggagccaaccaccatgcccggctaatttttgtatttttactagagacaaggtttcaccatgttggccagggtgatcttgaactcctgacctcaagtgatccatctgcctccgcctccgaaagtgctggggttacaggtgggaaccactgcgcccagccctagaattatcagatttaaacagacagaaaatagaatggtgggtgccaggggctgggggaaggagaatgggaagtgtgtttaatggggacagtttcagtttggaaagatgagaaagttctaaagatggatgatggtgacagttgcgcaacagtgtgaatgggctggacatagtggctcacacctataatcccaggactttgggaggctgaagggggaggatcacttgagcccaggagtgtgagaccagcttgggcaacatagggagatcctatccccaacaaatacaagaaaaaacaaacaaacaaaaaaatgatgcaaatgtacttaatgccactgaattacatactcaaacatggataagatggttaatttttttttttttttttttgagacggagtcttgctttgtcatccaggttggagtgcagtgatgcgatcttggctcactgcaacctctgcctcctgggttcaagcgattctcctgcctcagcctcctgagtagctgggattacaggtgtgtgccaccatgcctggctaatttatatttttagtagagatggggttttgccatgttggccaggctggtcttgaactcccaatctccagtgatccacccgcctcagcctcccaaagtgctgggattacaggcttaagccaacacgcccggccagatgccaaattttatgttctatctatgttaccacaatattgtaaatggcgaaaaaatttgagaggctgaggcaggaggatcgcttgaggccaggagttcaagaccagcctgggcaacatagcaagactctatctctgcaaaaaattaaaaagttagccaggtgtggtggagtgcgcctatagttctaactacttgggactatacttggctgagatgaaaagattgcttgagcccgggagtttgaagttacattgagctatgacagcactgctgcactccagcctgggtgacggagtgagaccctatctttaaaaaaaaaaacaaaaaaacaaaacaaaacaaaaaagccaggcgcggtggctcacgattgtaaccccaggactttgggaggccaaggcaggccaatcacaaggttaggagatcgagaccatcctggctaacacggtgaaaccccatctctactaaaaatataaaaaattaggaaggcatggtggcacgtgcctgtagtcccaggtacttgggaggctgaggcaggagaatcgcttgaacccaggaggcagagcttgcagtgagccgatattatgccactgcactccagcctgggtgacagagtcagactgcctcaaaaaaaaaaaaaaaaaaaaaagtaaaaaaaatcaaacaaactagagcagaaccaaagcccactccgccccaacagaaaagcaggcagtgacttcaaaacctgggatggctccttccagtctaaggaattgaaggttagacttggaatgctagcataacaagaagtaataataaaattgatgatacttattattgttatcccactggggaatggggccaactgacactaaaatttacacaaaagaactaaagtccattgataagctaagacaattctacaaaacaagagcacagatggagtagttggtctgtgagagagtaaaacatatttcaaagctacaaccatgagaacagcagggcatttttgcattaataaatggaccaatgggacagagaagacaggctccaatctctgggcactgagggtaagacagagggggtttccccaagccagtgggagacggtggattctgtggtgtggttttaggagaagcagcttactttacatgagaagagccaagctggatctctatctcatagcatacacaagaaagaaactgtgaagaattaagatgaaggtacaactacaaagctaaagggagataatgtagcagactatcagggactcaggaaagggaaagattcattcattcattcattcatccagtgacacagtctcactctgttgtccaggctggagcgcagtggcgtgatcacagctcattccagcttcgaactcctcggctcaagtgatcctcccacttcagcctcccgagtagctgggactacaggcatgcaccaccatgcccagctaattttttttttttttgagagagtctcgcattgtcaccccaggctgaagtggagtggagccatctcagctcactgcaactttcgcctccctgattcaagtgattctcctgcctcagcctcccgagtagctgggattacaagtgcccgctaccatgcccagctaatttttttgtatttttagtagagatggggtttcactatgttggcaaggctggtcttgaactcctggccaatttttgtattttttgtagagatgggggtcttactatgttacctaggctggcctggaactcctgggctcaaagcaattttcccaccaaagtgttgagattacaggtgtgagtcaatgtgcccagttaagattcttttaaaaattcttccaagcacaatccacatatgcaaaatataatggttttacctatattcaaaatgaagacttctggccaggcatggtggctcatgcctgtaatcccaacactttgggaggccaaggtgggcggatcacttgagtcaggagttcgagatcagcctggccaacatggtgaaacccagtctctactgataatacaaaaattagcagagtatgctggcaggcacctgtaatcccagctactcgggaggatgaggcaggagaattgcttgaacctgggaggcagaggttgcagtgagccgagatcgtgccactgcactccagcctggatgacagagcgaaactctgtctcaaaaacaaaaacaaaaacaaaaatgaagacctctgagatcctcatgggtgcggtgggggagtgccggagtttggcacaggcaaaaattggcaagggataatcttctagaacagggtcaacaaacctgggaagggctagatagcaaacatttttggttacgtcacacataaggactcggttgcaactgctcaactgtggcatagttctaacacaaaaccagtcacagacagtatgtaagtgattccgcgtggctgtatccaataagtttgaatttcacataatcttgtcatgtcaagaaatattttttttgagacagggcaagactctactttttttttaatgtgaaaaaaaaaaatcaataaataaactagagcagcgcctaaatcccattctgccccaacagagaagcaggcagtgacttcagggaacttcttttttttcttttttttttttgagatgaagtctcgctcttgttgcccaggctggagggcaatggcgtgatctcagctcactagcaacctctgcctcgcgaggtcaagtgattctcctgcctcagcctcccgagtagctgggattacaggcacccgccatcatgctcggctaatttttgtattgttgtagagatgggtttcaccatgttggccagggtggtctcgacctcctgacctcagttgagccaccacgcccagtctacttcaggcaacttctgttgcccaggctggagtccaatcatagcttgctgcagcctcaaaatcctgggcttgccgggcatggtggctcacgcctgtaatcccagcactttggggggccgaggtgggtggatcgcttgagcccaggagtttgagaccagcctgggcaacatggtggaaccccatctccacaacaacaacaacaaaattcctgggctcaaggaatcctcctgcctcagcctcccaagtagctgggactacagctgcacgccaccatgccaaactaatttttaattagtagagatggggtgtcactatattgcccaggctggtctcaaactcctggcctcaagtgatccttctgccttggcctcccaaagtgctgggattgcaggtgtgagccactgtacttggcccaaaatatatttttaaaatcattcaaccattaaaaaaaaacgtaaaaatcattcttagctgtgggttgtagaaaaacaggtttcaggctgtatctggcccacaggccgtagtttgccagttttgactctggaagataccagcaacttctaaaaactgctcagagaaaaaatggagaaaggctacaagtaattgacttacagaggaaccttattaggcatacacagagaagccctatctctcactgcctatcagagctatgccaatgaaaacaataaggagggctgaattccgaggctcgcatttataatcccagggctttgggaggctgaggtggatcacttcagccctggagttcgagaccaacctgaacaacagagcaagaccccatctctacaaaaaattacctgaatgggatggcacttgcctttagtcctagctactcaggaggctgaggtggagggatcacttgagcccgagaggtttaggctgcagtgaactgtgactgtgccactgcactccagcctgggtgacacaatgagaccctgtctcaaaaaacaaacaaaacaatgaggagataccattatgtagcagctgtcagatggataaaaaaaattagaaagacagggccgggcgtggtagctcacacctgcaatcccagcactttgggaggccaaggcgggtggatcacctaaggatgagagtttgagaccagcctggccaacatggtgaaaccccgtctctactaaaaatacaaaaatcagccaggtgtggtggcgggtgcctgtaatcccagctactagagatgctgaggcacaagaatcgcttgaacctgggaggcggaggttgcagtgagccaagatcgcgccaccgcactccagcctgagaaacagagcaagactctgtctcaacaaataaaaaaagaaagaaagaagaggccaggcgcggtggctcacgcctgttaattccagcactttgggaggccaaggcgggcagatcaactgaggtcaggagttggagacgagcctgaccaacatggagaaaccccgtctctgctaaaactacaaaattagtcaggcgtggtggggcgcatgcctgtaatctcagctactcgggaggctgaggcaggagaatcgcttgaacccgggaggtggaggttgcggtgagccaagatcacaccactgcactccagcctgggcaacaggagtgaaactctgtctcaaaaaaaaagaagaaaaattagaaagacagataaagccatatgttggtgaggatatgagaaaatggacaacttgaaccggagcacggtgttaggagtgcggatagggacagccttttttggaaaggatcagacaggacttggagtgaagttgcaaatcctctaggaatgggcagtcccacagaaggggtcgtgtgaagatgactccagcattgttcgtggtggccggaaattagaagtaaccagatacctactgtgaagggattagagaagagggtaggtgggtggggtggctcacacctgtaatcccagaactttgggaggccaaggcggacagatcatgaggtcaggagttcgagaccagcctggccaacgtggtgaaaccccgtctctactaaaaatacaaaaattagccaggcgtggtagcagggcatctgtaatcccagctacttgggaggctgaggcaggagaattgcttgaacccgggaggcagaggttacagtgagctgagatcacgccactgcactccaccctgggcaacagagcgagattccatctcaaaagaaaaaaggaagaaaaaaaagaaaataaaaagtgataaatcagatttacaaacctcagtgtggagagttcaaaaatagtgtaaggagaggaaaaaataagaaacagaaagagatttttttctgaagcacaacaccatttaaggaaatgaaacacgcacaaggcatatttttcaaggacactcaaatgtctaaataagtttctggaaggtggtttgtaaggaatgggattagatggggtgggggtggcactgacggtggagagcggagggtggtgagcttcagtctgtgggtgctgtttttacatttttaaatggatgggaaagaagaatttaatttgggactcatgaaaagtatgtgaaatagaaatttcagggtcctgcaaataaagttttattggaacgcagccacgttcgttcatttccatattgtctacggctgcttttgcaactgcaaaatgaaggccctgaagcaccaaattcaaaaaggtatacattaaatatgtgcatttttttgcatattaagtatacgtcaataaaatcagaaaaagctgggcacggtggcacacgcctgcaatcccagctatttaggaggccgacgtggaaggatcacttcagtccccgagttcgaaaccagcctgggcaacatagtgagacctcatctggcaacatagtgagacctcatctcaataaaaaggatgaaaggaataaaaataaagtggggaggaaaaaagaactgaggcagagttgaatcaatgcaatagagaccgtatgacctgcaaaagtgaaaatatttactgacccttagcattgaaggttgaaggtggaggctgaaggtgaaaaaataataagtaatacaagagaagtggtctgcacaggctaacgtggatggttgtcaggagctgaggaatgagatgaactcagttttggactcctgaaggccaaaataattttttttttttttgagacggagtctcactctcactctgtcgcccaggctggagtgcagcaatgcgagctcagctcactgcaatttccgcctccccggttcaagcgattctcctgtctcagcttcccaagtagctgggattacaggtgtgtgccaccacacctggctaatttttgtatttttagtaggggtttttgccatgttgcccaagctggtctcgagctcctgacctcaggtgatctgcccactttggcctcccaaagttctgggattacaggcatgagccaccacacccggcccatgtaaattctttttttttttttttttaatttaggctgggtgcggtagctcattccagtttgttcaaccccttgataagcccgagcctttgcttatctcagggcctttgtccctgctgtgctcctccctggaacattgttttttccacctcttctggtgacttctttcatgtcttcattcaaagatgctccttggagggtgggtgccgtggctcatgcctgtaatcccagcactttgggaggccgaggcgggcagaccacaaggttaggagttcaagaccagcctggccaacatagtgaaaccccgtctctactaaaagtacaagaaaattagctgggtgtggtggtgggtgcctgtaatcccagctacttggaaggtggaggcaaggagaatcgtttgaacccaggaggtggaggttgcagtgagcggagatagcgccattgcacaccagcctgggtggcagtgcaagactccatctcaaaaaaaaaaaaaaatgctcctttgagaggctatagggccaagagctgaccttgggcaccaagtatcaaccatgcctggtaccatgatgaacacttgacatgaattgattctctccccccccacccccgcccacaagattggtcttgctcaggctggagtacagtggcgtggtcacaactcactgtagcctcgaccccctgggctcaagcagtcctcctgttttggcctccgaaagctccaggattacaggcataagccactgcgcctggctgaattgacatattaaagcctcacattattccagtgacactgtgccatcaggacccccgatttgcaaatgaggaaactgaggcatagagagatttcatcgcttgctcaaaggccgagaaggttggatcacctgaggtcaggagtttgagaccagcctgaccaacatggtgaaaccccatctctactaaaaatacaaaaattagtcagtcatggtggtgcatgcctgtaatcccagctactcgggaggcggaggcagaagaatcgcttgaactcgggaggcgggggttgcagtgagccgagattgcatcactgcactccagcctgggcgacagagcaagactctgtctcaaaaaaaaaaaaaaaaaaaaaaaaaaaaaaaggaagatatagaaatgaattaagacattccagcttggctcaagcaaggcagagattggggctggctgcagcaagagggaataaaatgagactccaggaagaactttcaggcagcagcttgaatgcaaagaaggtggacatcgctatgtctgtttgtcctgcaggcagaaggcctctcagctgctctgggaggcacgtctggaatggtggttgcctctcagagattccgaggctgggccaggcggagcctctggcagggggccagaacctcaggacctggtgtttgggatagacacagaacaggcgggtggtgtccagagctggccaggaacaacacgggccggcgagaaaacacagctgggtccctgccctccagcctgtgccctccagtctgttggtaggggctctggccacctgacatttgaggctgggatgagaacttgggccctaccttcgagccctgctgcagattcaagctgtcctggttatttatttcttttttcttttcttttcttttttttgagatggagtctcactgtcatccaggctagagtgcagtggtgcgacctcggcccaatgcaacctccgcctcctaggttcaagcaattctcctcccttagcctagctaggactacaggcgtgtgccaacacgcccagctaatttttgtatttttagtagtgacagggtttcgccatattggccaggctggtcttgaacccctgagctcaggttatccacccacctcggcctcccaaagtgctaggattacaggcctgatgttctgggtttggatactggctcagttgagccacttcctggctgtgtgacacaggacaaatgaatctcctccctaagcctcagtttccccaggtatgaacaggttgaccagaacattatcagcagaagcagcaaccagtacttaaccgtgtgcattaattcataaattctccacctctctagaggtggagagcattatcatgccacttcacagatagggacgtttagggctagagaggtgatgttgctcaccagtatcacacagcatgagtttgaacgcacctggcagagcctccctgaccatgtttccagaagaacagctgtcattattattgttgagacacagtttcactctgttgcccaggctggagtgcagtggcacaatctcagctcactgcaacctccggctcccaagttcaagcgattcttgtgcttcagtctcccaagtagctgggattacaggtgccggccaccacgcccggctaatttttgtatttttagtagagacagggtttcaccatgttggccaggctggtcttgaactcctggcctcaagtgatctgcctgcctctgcctcccaaagtgctgggattacaggcgtgagccaccgtgcccagccagctgtcattattattattaattattttgagatacagtttcactctgtcgcccaggctggagggcagtggtgtgatcttggctcactgcaacctccgcctcccgggttcaagcgattctcctgcctcagcctccggagtagctgggactacaggtgtgcgccaccacgcccggctaatttttgtatttttaatagagatggggtttcactgtgttggccaggctggtcttgaactcctggcctcaagcgatccacctgccttggcctccaaagtgtgggattacaggcgtgagccactgcgcccggcccagctgtcattattatgagtcatttgggtggcttctcccagggacctcaggacaacccagcagctgacattctgcacagccggcatcccctttcctggcatgaggactcagtacttcctctgggaagcacccccttcctccctcaaaggccacagggcttgggtggggctcccctacccccggcgtccatggctaggcagacagggacaccgtgattggctcagcaatgggcacatgacccaggccagccaatgagggccccctctgggatttttactggtgctctttggattaaggatctccctctccactaaactggacagacagatgcctggagcagtgaggtcactttcccttgcctgcctgaaagagaagctcccagggaaaacaagaagagaaaggcaccaagttagattcctgatgatatctgagcactgaggccagcgtggtggctcatgcttgtaatcccagcactctgggaggccaagacaggagcatcatttgagcccagaagtttgagaccagcctgggcaacataacaagactttgtctctacaaaaaataaaaaaaattaacgaggcacagtggtgcatgcctgtagacccagctacttgggaggctaaggcgggaggattgcttgagcctaggaagtcaaggctgcagtgagccatgattacaccaactgcactccagcctgggcaatggagcgagactctatctcttaataacgacaacaagaacaagatatttgtgcacctggatccagccatgcctgaagctgtcatcagttacgtaataacacatttccttttcactgcttgaacagctccgagattgattcctgccacttactgaataaacagggaggtttctgcctggtaaaccaacagccttggggaactttcccccaaatacctcccactttctggatactgacaaagtggcagtcacctaatttctctgcatggttgctacagccctgagggttggctgcacaattctcctccttttgtggatgataagacagagactctaagagttggactgatgtgtctggtggaaggtcgggggctggggctggaccttggcattctttttttttttttttttttttgagacagagtctccctctgttgcccaggctggagtgcagtggtgtaatctcagctcactgcaacctccgcttccctagttcaagcgattctcctgcctcagcctcctgggtagctgaggtttacaggcgcacgccaccacacctggctaatttttgtatttttagtagagatgggtttcaccatgttggccaggctggtctccaactcctgacctcaagtgatctgcccgcctcggcctcccaaagtgctgggattacaggcatgcgccaccgcaccctgcctggaccctggcgttctgagagtccaggatgagccatgggaagaaagaggccccccccccccaagccattctcccctgcctgcctgcgaccgcttacctgctgctccatcgcagcttcgctctgtgatgctaatcttcttcaccatatggacgttgctggtagctgcagcgggcactgggcacattgtctccaccacctcctggctgcggaacacaggtgggctctcaggcctaccaggcattgccagggccctcagccctgtgccgtaaggctccaggctctgggcccgctgtgcgggggcgccagcggctgtgctggccaccacctccacctcccgtggcccttctaccacccggactgtatccacgcggaccgggctgtccggcggtggccaggcctggggctgggggtcagcctgccgggcctgagctgcctgcagctcctgcagcgccttcttgagctgggtctccagcacagcgaccttggcggcgagggcagcctccccatcaggcatgcccaagtcccgttctcgaacccaggtgcccacactccgggtctccagtgccactgggtcctctgggggatcggggaggtccaggcagagctcgctgcgaccccggcccgctgtggggtggcccaggaacttctggctcttaagttgtactgtgagctgccgcttttcctcctggagcaccgagagcttcacctggagcacagggatcagcttcacctgctcctccagctgccgcagcttccgcagggcacccgccatctgctcccgcacgtgggccaggtgcccggcactgggaggcaccggtgtggacagtcctgaactccgtggtgtcgggggtggcaaccccacgcccaccagggaggctgtcgagccggccgcactgggggtcagggagcccaggccggtgggtgtggccgcctggtcctcgagacggcgacgggcatccagcagcgtgcgctccacccgcggattgaagccaccgcgggtctccagagcaccatactgagggtagaagccacggccgcagtaggaataggctgagtggcggctgtccccactggcattggagcacagcgactcagtggacgtccaccaggagccagggccacggggcagcgagctcaggcgggggcggcgctgcactgccacgcgtcgcagcgtgtggcccttctcgatgtcatccacgtacttgaggaagtccaggtccaggcggtagccatagggggtctccacggagtagggtggatcggggtccttggcagggaaggcaggtggggaggctgggccaggggtccctggggatgggagaaacaccaggacctttgaatcctcttgtccccattctcagggtgaagactgatgcctggggagagttggggtttatttgccgaagagatgggagcccacctggtactcaaccgcgtctgctctcagaccctccagagcagggctatgcctccccttcagactcccggcgctaggctatgtcgcctctcaaatcccccaggacagggctctatccctcggcttagactaccccctttttccggtaagactctgcctcccccttcagaccctcccagggcaggactctgcctcctccctcagacctctaattgttgggctgtgtcccaccctcaaagtccccagggcaaggtccccagccccctcaggcctccagaactgaagctccccggggcagggccctcttccctgagtcccctgacctgggaagggagcaggcacgtgcaggacctgggccatcttcttttctacagatgctccttggaagtcacttgagggactgcgagtcagactgcctgcagcaccggctgaggcttacctggggaaagagaaccacggcgccgggagttaggagtctgtagggggaggggaggagatgaggccagccccctccacagctggttcacccagccccccaacccaggtctgggacccactcatagacgcacacccagcctggctgcggaagggccccccccgaccccctcccccccgcaggtctggaacaaagaaaccaaacctcactgcctgcttgcacatctgtccaggccctggacaggctccagctgttcccatagcccagcctccacatagccctggggctggggggccccaagcccaacaggccccacccttcctgcaccccctcccctcagcccaggcccggagctggccacacggaaggatgggggttgaggcgctaaggggttggggaagaagggaacctcgtcttcctgcaaggatctgaggagacagagacgcagggggacaaagagaggcaaagcatggcgaaggggacccccagtgaccccaaagctgagagctgggtcaggcctggactgggtcggggggaaggggtagggaaagttggggaggcagctaggagtgaagcctttcccctttatggaaacaattttctctaaaaataaacagtttcactgccgggctacacagaacttcctgcccgcctaggatgcgtccgggcccaggggcgcagtagggatagagggccgggtggaggcccaggaagtcctgggggtggaggggaggaagtaagagggggcgcctggaggctgcaaaagggagggacagtcagagcctctcactaaacccccctcagccttggaggccggccagggctcttttgtccccaatataacccatctgaacttggctggtcctttctgttatctgacctccagccatcatgctgcagaggccccagcccatcccaccatcagagtaaatcctttctggcctttgagtgctggggccggcaggtaccttgggaggatgggccaggtagggcacctgctgggcatgaaggcagggctggggctccaggggcacctgagcttgtccttgttctcccgtcctgtcttgctttgtctctctccaagtctctctgtgtctctccacgtctctctgtgtctctccacgtctctgtctctctgcgtctctctccacgtctctgtccttctgcgtctctctccgtgtctctctccctgtctttccacgtctctgtcttcgcttctctgtctttcaacacctggaacacatggtcaccaattgcaggaaattccgttttccatttgcctggaggctcacccctgagcaacagaaagttgattgaaaatattttctggccaccaaagagagatggagaagcagggagcaagcgggattggagcaggattggaatagccgagcggggtgggctgggggtgggggaagtgagggtgctgctgggtaaatagtatagtaacagtaatactaacatcaactcttttttttttttttttctgagacggagttttgctcttgtcgcccaggctggagtgcaatggcgcgatctcagctcacggcaacctctgcctcccaggttcaagcgattctcctgcctcagcctcctgagtagctgggattacaggcacctgccaccacgcctagctaattctgtatttttagtagagatggtgtttctccatgttggtcaggctggtctcgaactcctgacctcaggtgatccgcccgccttggcctcccaaagtgctgggattacaggcatgagccactgcacccagcctaacatcaactcttttaattgtcatgacaattctatgagatgggcacttatcgccccgtttcacagacaggggatgcagagggtacagaaaggtacagtggcttcctcggggtcactggggccatggggaagtggctgggcctgaacatgaacctaagcctggtggatccccccactgcccaccaagccaccaccctcagactccacatcagatatctctacccgtttcccagatacggagactgaggtctgagggtactcagtcatctcaccgccctcgatgaggaccagcacgtcccgagtaaggggaagagaaaggagacgagggggtgtggtgggggagatggatgtctgtggctgagacccttctctcgccatgggacccctggggaatggggaaggggtgacaggataagacagagatggagagactggagcctataagaggggacaggtagggagcgcagggaaggggcgcgggtctccccaacccaccacccaagaccggcctgcacatcgcggaggtcggtggtggtggtgggggggggtcttcccgccccaaactcggggtggggggaggcgagaaggaccccgccccgtgcagagagggggcggggcctgtgggatcccgggctaatggcaaacagctgccgctccccacgccggcccagccgccaagcccaggcccagcccggccggacgcccggccgccttcccgccgtctggggcatggccgcggaggagggcgaggggggacagtgcggggagagggcagagccggggaggaacagaggcagaaagtgggacagagacaggggagagcgggcagaggggagccaagacaggagaaacgggcagggcacgaggaatcgatggggggtactgggaggaatcgatgggggtatggggtcaaagacgaggagggggcagggacgcggggacagacactccaagtctggaaagtttgggcacagaaggtggagttggaggcagcggctcgttgagaccagcgaggtcgtgtcccagggttggaggcggggggtagggtagtaggtgtgtgtggagggggtgcacactcgatccccgaaccagacttgaacccctacccagccccgggtcccactcgccttgcgcgctccggccgctgccttccctgggtcccgccgcccgagcgtcttcgcgcgcgccgcagcctgggcgcccggccctcggaggtggctccgcccgcaccacgccccctccggctggtcccgcccccccagccggcaccgccccctccagccgcccgggcgccccggccgcggtggggggtggggatggagagacgctggttggagactggatctcacctggacagcaggtgtgtgtgcgcgccggggtgtccggcctcgtccttccttcctccctaagtccccgaggcagggtcctcccactgccggcctcccccccaccgcctgctgtccctgggccgctgcggggggcggaacggctcggcggcgggagggggtggagctggccggggcccagctcggggagggcgcgcggggcgggcgcggcagcgggaggtcacccctcccccaggcggcccagggctggaagcggcccagcgcagtcctggcacacggtggcgtgaccgccgcgcgagaagggaggctgcagagtcctgggcgccggcgccagccagacctgcattcccatcccagacccaccaaacttttgctgctctgtgcctcagtttattcatctgtaaaatggagatgatcatgttagctacctgataggagcgttgagaagattcactgaccattaggaaggggcctaaccatcaggaaggaggcccttcgggttaaaaactctcataaatggagtggcctacttttgcagagatctttctgggagcccttttagtacacagccagccactcagcaagggcttaataaatattattaagccggcgaggtggctcacacctgtaatctcagtgcttagggaggccaaggcaagaggactgcttgaactcaggagttcgagaccagcctgggcaacatagcaagaccctgtctatgcaaaaaaatttttaagtgaaaaaaaattaggccaggcgcagtggctcatgcctgtaatcgtagcactttgggaggccaaggtgggcggattatttgagccaaggagttggagaccagctttggcaatatggtaagacgccatctctacaaaaaacaaaatacaaaaaaccacctggggccgagaaatggctcatgcctgtaatcccagcactttgggagtccgaggtgggtggatcatctgaggtcaggagttcaagaccagcctggccaacatggtgaaaccccttctctactaaaaatacaaaaactatcctggcatggtggtgcacatctgtaatcccagctactcgggaggctgaggtatgagaataacttgaatctgggaggtggaggttgccgtgagccgagattgcaccactgcactgcagcctgggtgacagagtgaaactctgtctaaaaaaaaaaaaaagaaaaagaaaaaaaagccaggcacagtggcatgtgcctataatctctgctactcaggaggcttgagccccggagtttgaggctgcagtgagctatgactgtgacactgcattccagcctgggggactgagtgagagcgtctgttaaaaacaaacaaacaaaaaccaggtattgttattgcaggtaagcatgtgacattatttgtgtgttgccttccctactagaacatcagctccacaagggcaggaatttttgcctgttgtcaccacgatgtccctggcacccagtatgttcttggtgtccccattgatgatgcagggatgtgtggatatggggcagtggactgtgagcatgtgatgagcatgtgacccagcccctagtgaccgcaccacatggcacaggttgcttataaaaaccattttaaattaaaaaagggaggaagcatcagtgcacacagatggggacacaggggcagagggcccagccccaagtacagtgtggtcaccccacagcccagtgggcaccagggcagactcccctcgcagcacagacagctgaggcccgggtgctggttcctctaggtacagctttggtccttgtgggctcagaggtctgcctttcggaaacttgctctgttcaaggagttcctggaaaaagaatgagggtgggtcagcatggccatggggcccccaactccatagacctcccagcccacatcctcttcctcctcctcctcgtcttcctccaaggatccttctgggatctctcctgtccctgatctggctgtgggattctccgattctctcttgcagtccaccacggaaggtatgaatcatccccattttacagatgtagaaactgaggctcagaaagatgaattcatgtatctgggaaatgactgctcagagcctgccctgcctttgtacatctggatgacatattcagatgcttatgcaaaattgaagccaccgcagccaggcgtggtggtggctcatgctgtaattccagcactttaggagggcaaagcggatggatcacctgagatcaggagttcgagaccagtctggccaacatggtgaaaccctgtctctactaaaaatacaaaacattagccaggcgtggtggcagatgcctgtaatcccagttactcaggaggctgaggcaggagactcgcttgaatctgggaggcggaggttgcagtgagccaagactgtgccaactgcactccagcctgggcaacagagggagagtctctcaaaaaaaaaaacaaaaaaaaaaccggaaacaaaacaaagtccaagctaccagcaaacatgttgctgtgtatgtgtacaacagcccccatcctgtacctgtcctggtctgcctctgcatcccctctctagtctctaggatgggggcactaggtcaggcacctgaggccgggtggggtgggtgccatcagctggggcaggcgctgggtaagcaggggctgcagagcctcccgcaggcggcagtagttgcgctccagctcacggtggtactccttctggtccggcccaatcagggccttatttttccgcagcgcatcctcacatctgagggccagagggtgggagatgctcagagactcgcacacgggactgaaagcaagactaggggtgggggcacccataaggcgggaccaggcctgcagaaagacccgcaataggaggtcaggttgggagagtggacttaatgggaatcgggcagatgggggagccatgcagagatcagatgggcagagagcaggcctatgcaggttaggcagacacgagacccctcctggggggttttgcgcctacttcttgcagaagtccttgaagcagagccgcaatttgttgtgatgccggaagagcttggggtcttccgggatctctgctaaaaacacctgggccacctccaggggaccctgtggggtgagagggactggtgagccagcctgcatggcacctggagtcccccgtgcggcttgcatcccccttccaccagccgtgcctggttcacggtgggccctacagagccctgaagcaccatctgtagcatcttagcatctggtgggtcctgctcggtggcaaaggccagctcccgtgtcttcttctgcatgtcctcgatggccacctccactggcgtcagcaccgtctgtggggtaaggggaggggtgtgtactcgctggggcctgaggaggtcctgatcgaagccagtcgggggcagctcagaccccgctgggagtgagaggggtccaagaacccaggcaatgaacagaatctgggggccttcctgggtctgactctgggggggtccagccttgggtctgctgggtctggtgccctggggtccaggggctttacctctggggtctccagacttccttgggtctggaggtagagatttggactggaagttggagtttggggtccccaacctggttctggggtacatgagccaatttctgggtctagcgtgtccacgcctctcctctctgggtctggaatccctgggcttctcctccctgggccttcttagatttggagtccctgtgcctcccctttgtgagtctagaatccctgggtcctcctgggtctggaggtagaggtttcagtttagagattggaatgcagggtctccatatcttctcagcccagttctggggtacctgggcctcttcctgggccacacctctcctccctgggccttcctagatctgggctccctctgcctcctctttctgggtctggaatccctgggccaccctgggtctggggtccctgcatcttgcctcccaggtctccctgggtctggtctcctcccctcccctccctggggatctggtctagggtccctgtgccacccctctctgggtctgaggtccgtgaaccaccttgggtctgggtccctgtgtctaccctcccctcccctcccagggtctgatgtcccctcacctccccacccccgccaggcccaggatccccacccacctcctcccggtggcacacacggatgcgagtcttgatgtaggggaaggcgtggtcggtgctgagcagcgtcttacgcttgtgttgctcgggcagctccccgtgtgcgcgcccatccggcgtgaacggcgtgcagaacaggaatgtgcgaagcccatagttgcggtcaaagtaggtcacccggtccttgagctcgtaggtatcaaagtacggttccacatacgtgatctggatgtaggcctgggcgcagggtcaggtgtgaggatcccacagccccagcacgcacagcccaagccctgttcctggagagaggggatctggggactttgtcatttccaagtcttcctatgtctggatgtttgggaatcccctgaggaataggttttggggtccctcagtgaaatatgatttggggtttcccagagaaagaggatttgagggtccccaggaaacagcacttggagtctctgtgaatctaagattttggggaaatggttgggggacccaccttttgtgagtcaagcttggacttgtccacagggttagagtctttgataatctcaacgacgtcgtcgccaaatctctccgtgtagaactcctggagacacagggctgactcggggccacccagggacagcccctactccagccccaaggcagccccatgccccgttccacccccaaccacaaggacgtgcctccagccggtgtgagatctctgccagcttcgtgatcgatggctccttgtacacaaactcctgctcatccaggtcaccgaagtgggcgccgtagaagcccacgcggaaatacgtcccgaacacgcgctggggctgtgagaaagggtgtggttgtccgggaggcccctgctggaggtctccctgccccagagataggtgtctcgaatatcaggatgggagtgtgaggaccccgagaacatcagggcatgggcacaggcagggggccctgagaacattggggcatggattgcaataggaagttaggactggggctgtattgtttacgggtgtgtccctaatgcccgtgggacagggtatacagcaggtacccaatacatgcatagatggctgaggagagggatggctgtctctcactctaggatggaggctctgcctcctttgttctagggcattctccttcctgtgccctgaggcccacaagaatgggtatacagtaggtaccccataaatgcttggatggctgagggaagggatggctgtgtctcactctaggacagtggctctggttcccttgttccatggcattcccctgctcctgtccccagccctaagtttggaagaaggaaccccctccctaccaccctaaaaacaccaccccatgactggaaaggaagtagaatggctggatgttcacttaccaaggccgatccggggaggatggggcagacatggtggggccagaggtgtgggggacagagagacaatgtcatgggagaggtcagaggtcagagttccctcaacccccagggtcctggttaacactgccccgtgagaatcattccgtggggggagagatcagagacgggaggggggcgggggcgaagaggacctgccctccccacccagctcccacccagcctgcctgcctgggctctgggtttctgccatctttggccagaacattctccccaaactaggagatgcctaaaaatagacctaagcagggaagaagcgggattcgggggggctggagcgggaggacacattaaccagaaatgaggagcagagagcctgggggaggctggaagctgggtacgcagggagagacagagactaagagacagtgagataccaagatagggagagccacgtgatagactggggagagatgagaaagagaccaagagaccatgagggagtcaagagtcaccccgccacccccctgcagtgaccaagctggccctggcagagggaggggtgtctctggagagctcccagctgggtgagtcacaagctgccctcgagatctggggcggggggtgggggcatttttggggaagggagggaaataatggggtgggtcccttgtggccacagccccagccccaagggccagcggccatgctcctctggtgccccctggtgttcactgatggctgctggccagtcatcacgggggtcccagaggcaggtggctgtccaccaaggctgactcacctcccagccggaactctgtggggaagagaagggtcaaggtcagcagatccctggggatgaggagtggggatgaggagtggggctgagggtggggtctggggagggggtcctgggcccacctggtgcatgatcttggtgaaggcctcctgcagtttgccgtgcaccgcggccagcttcttgtagtcacggtgggcttccaggatggggatgaggttcttgtagacctcattcaccgcctcgtagagcccgccctgagggtgaggtggggtcaggattccccaaactgtcttcctctctccactgtgctcctgtctacccatctcccttgtgagcctccgtgctcctacccaccctccatcacctcctccaggaagcccaccctgaccacccctatcccagataggggttgagcctttccactcagctcccacagagggctccatggtcttcactgctacttatcttttttgtttttttgagatagggtctcactccatcacccaggctggagtgtagtggtacaatcatagctcactgcaacctccaactcctgggctcaagagatgctcccaccctagcctcccacatagctggaactacaggtacatgccaccatgcccaaataattttattttagtttttgtagagtcagggtctcactatattgccctagttggtcttgaactcctgggctcaagtgatcctcctgccttggcctcttgattagctgggattacaggtgtgagccaccactctcccagcccttcaccacttttagcaagaatattctatggcacaggtacgatgtacatctgcacttcacccatctgtcttccctcattgatgggagaagcagtttttttttcctattcctcaaagaggaaagtgagtctcagagacagaggcattccccagggccaagacccaaacacccacccatctggccctgtgcccatgacctccatgcccaactgccttctggcatgtggtaatatgcccctcacccccagcgggtgctggcatcaagcctggctcaaaacaggcatcctgtgaggtttgctgactgtcagaaggcctgtgtccaccccctggtttcttcccctgaggcttttgtgtgtgtatggttttttttcgtaatcttttttttaatactttggggtacatgcgcagaacgtgcagttttgttacataggtatacacgtgccatggtggtttgctgcacccatcaacctgtcacctacattagatacttcttctaatgctatccctccccttaaccccacccgtgtatttttttttttgagatggctgcagtccagtggtatgatctcggctcactgcaacctctgcctcctgggttcaagcaattctcctgcctcatcctacttaatagctgggattacaggcatgtgccaccacgcccagctactttttttgcatttttagtagagacggggtttcaccatattggccaggctggtctcgaactcctgaccttgtgatctacccacctcgacctctcaaagtgccgggattacaggcgtgagccactgcacccagccatatttgtatttttagtagagatggggtttcactatattggccaggctggtctcaaactcctgacctcgtgatccgcctgcctcggcctccaaagtgctgggattacaggcatgagccactgcgcccatgcccagctaattttttgtatttttttttttttttgtagaggcagggtttctctatgttgcccaagctggtcttgaactcccgacctcaagtgatctgcccgccccggcctcccaaagtgctgggatcacaagcgtgagccaccgcacctggcccttcctctgaggccttcgtctccaagaatccagcaaagtgacaataatgaaaataatgtcactaaagggccagcaccacagaagaaatctcactggaacacctgacttcaagtgtgaccttgaatctcactgagctctcaaatgtaactgccagttccccaaaatgtgaggaactgagaaacaggtaaaatgacatcacatggacacagccagccccacacaaaccagaaaaacacacggagcaaaggccccagggctcctgcaagttaaatgtagaaaccaccaactgccctcatacaaacaagcaaactagagaagaaaaccccttttccacagtggaaaatcagttgccgggcatgctggctcacgcctgtaatcccagcactttggaaggccgaggcgagagggttgcatgagtctaggagttcaagcccagcctgggcaacatagcaagatcccatctcttaaaaaaaaaaaatgaacgaagaaaaaaaaattagttgggtgtggtggtgcgcacttatagtcccagctactcaggaggctgaggtgggaggatcacctgagccgaggacatagaggctgcagtgagccaggctgcactccagcctgggtgagagagtaagaccctgtctcagaaaaaaaaaagaaagaaagaaaaaagagacttaggatacagatcagcgacagccattgtgggcccttaatggatcctgattcaaaccaagtcaccccagaaaagatacatcagagatcatctgggacatctaaatatagagtgcaatgaaataaaggatgaccattaacttggccacgcgggataaaagttttataaaagggtctttatcaggaagggttgcacagggggtacttgtgggagtggtgggaaaatagctgggatttgtggtggtttttttttttttgttttttgtttttggagacagagtcttgctctgtctgtcaggctggagtgcagtgggcatgatctcagctcactgcaacctccgcctcccgggttcaagcgagtctcatcccgagtagctgggattacagacacctgccaccatgcccagctaatttttgtatttttagtagacatggggtttcaccatgttggccaggctattcttgaactcctgacctcgtgatccgcctgccttggcttcccaaagtgctgggattacaggagtcagccactgcgcccagcctgggatttgctttaagctggagcttctccaacttgaagatgcatgcgaatatcccaaatctttattttatttattttttgagacaaggtttcactctgtcacataggttggagtacagtggcacgattacaactcattgtagccccaacctcctgggctccagtgatcctcccgcttcaagcttcctgagtagctgggactacaggtgcatgccaccacacccagctaatttcttgtatttttttgtagagacagggtttgccatgttgcccaggctggtcttgaactcctggcctcaagtgatcctcctgcttcagcctcccaaagtgctgggattacaggcatgagccactgcacctgactcatttttattttagtatagaaagtttcaagcattgctgggtgtcccagctacttgggaggcttgggtgggaggattgagtgaggccaggagtttgagaccagcctgggcaacatagtaagactccctctctatgaaaaaattaaaaattggcagggtgtagtggcacaacacctgtaatcccatgactttgggagtttgaagcgggcagatcacttgagctcaggagttcaagaccagcctgggaaacatggcaaaaccccgtctctacaaaaaaatacaaaaaattagccggacatagtgatgtgtgcctgtagtcccagctactcaggaggccagggtgggagaatcacctgagccctggaggccgaggttgtagtgagccatgatcacgccaccgcactccagcctaggtgacagaatggaggtcctgtctcaaaaaatatcacaaagaaaaaatatatataataatttaaaaattggccaggcatggtggcatgtgcctgtgttcccagctacttgggaggctgaggtgggaggattacttgagctcaggagttcgaggctgagtgagctacaatcacaccactgtacaccagcctgggcaaaagagcaagactctgtcaaaaacaaacaaacaaaaaaacaagaaaggaaaaaagaaaagaaaggaaaattgaaagcatctctaatgtatgtaaggcttgctatatcaggcctgcatcaagggtctcatggagacataggcaaataacagggcctctgagaaacccaattctccttccttttttttttttttttttttgagacagagtctcactctgtcacctaggctggagtgcagtggcgcaattctggctcactgcaacctctgcctccctgggtcaagcgattctcctgcctcagcctcccgagtagctgggattacagccgtgcgccaccacgcccggctaatttttgtatttttagtagagacagggtttcaccatgctggccaggctggtctcgaactcctggcctcatgacctgcctgcctccgcctcccaaagtgctggggttacaggcgtgagccaccgcgcccagcctattctccttctttctaaatcccctgctggaagggtctaggaagcagatctgatggcacctccctggcccgagccccctctcctgcacccagtccccaaggcctcaccatggtgaagtagccggctgcctgttccagcaaccctaccagccccagctcagtgaagtgcttcccggagcagaagccctcctcgtcgggcgacaggatgtcgtcggagatggcggactcctctagcacgttggatgagatgttctggggtgggagaggtggcgtcagaccctggtccccactgcactcgtgccgtccgccacctgccaacccctggccactcacctggaaggaaacgcagcccacgggcaggtggcggtggtcctcgagcagggcgaggtactcagccacgagggcggccgcgtgcaccatgcactgggcggcctcggcgtggttgcccagctccgcgtgcttcccggccatgttctgcaaccaggtcagccgaaggtccggtgagccctggtagccccgggcaattctggagtccaggtgaggggggatgtgaggaggggactcacctggtcctccccacctgcctcccacttgtccattctcttcactggttacccccatgtccgccccaaggaccagccaatctcctcacctgtaccccatcccctcactcattccctcacctggccatccctcatctatctccccacctgtcttccccttcgcctattttcttacctgctggccagtcatctgtcttcacctgtctcctcccctgcctaccttacgtattcctgtagtcatcttcctcctcacttgtcctgctgtctcccactgaccagccagtctcctcacgtgtatcctactcacctgtctatcccctcacctgtccaccccctcacctgtccgtcccttcacttgtctatcccctcacctgtccaccctctcacctgtccatcccttcacctgtctatcccctcacctgtccaccccctcacctgtccatcccttcacttgtctatcccctcacctgtccaccctctcacctgtccatcccttcacctgtctatcccctcacctgtccagcccctcacctgtccatcccttcacttgtctatcccctcacctgtccatcccttcacctgtctatcccctcacctgtccaccccctcacctgtccaccccctcactgtccaccctctcacctgtccatcccttcacttgtctatcccctcacctgcccaccctctcacctgtccaccccctcacctgtccatcccttcacctgtctatcccctcacctgtccaccccctcacctgtccaccccctcaactgtccaccttctcacctgtctatccccttacctgtccaccctctcacctgcccgccctcacctgtccaccctctcacctgcccatccctcacctgcccaccttctcacctgtccaccgtctcacctgtccaccctctcacctgtccatcccttcacttgtctatcccctcacctgcccaccttctcacctgtccacctctcacctgtctatccccttacctgtccactctctcacctgtccacccctcacctgcccaccctctcacctgtccatcccttcagctgtttgtcccctcatctgtccacccctcacctgtccatcccctcactgtctcttcacctgtccacccctcacctgttcatcccctcactgtctcttcacctgtccacccctcacctgttcatctcacttggccatcccttcacctgtctccttatctgtccacctcctcacttgttcatcttctcatctggccatctcttcaccagtccatcccttcacctgtctccttgcctgttcaccccttcacctgtctccttgcctgttcaccccttcacctgtccaccccctcacctgtctatcccctcacctgtccaccccctcacctgtccatcccttcacctgcccatccccttacctgtccaccccctcacctgtgcatcccctcacctgtccatcccttcacctgtccatcccttcacctgtctgtcccctcacctgttcaccctctcacctgtccattccttcgcctgtctatcccctcatctgtccacccctttacctatctacccctcacctgtccatcctttcactgtctcttcacctgtccaccccctcacctgttcacctcacctggccatcccttcagctgtctccttatctgtccacctcctcacctgttcatcttctcatctggccatctcttcaccagtccatcccttcacctgtctcctcacctgttcacctcctgacttctttacctcctgacctgtccatcccctcacctgtctatcctgtcacctgtgtcctcacatgtccaccccctcacttgtgtcctcacctgtccatttcttcacccactcacctgcctgtccaacccttttcctgtcttcccacttacctgtctcctcacccatccatcctactcacctgtctcctcacctatgcagcatctccccgcttcctctattcacctgtctcctcgcttatccaacccctcacctgtctatcccttcacccccctgccccaccttttcatttctcacttgaccctccgctcttgagttgactctacctgtggaaacttgagtcacctgaactcactatttccccttccttgtgcaccatctcacttgtctatccacctatccctcccatatgccccacctcccccatctccatcacccgtccgcctctcctacactcctcaatgggtctactctctggatctcatttcccttcacctgtaagcacctcacctgtccccctcacctgtcctggctctcatctgtcatcctcatcagtacattctcctggcatcctctttacctgtttgctcatctgttctctccttacttgtgccctcatgtctgctcacctgtccccctcacctgtctgctcccctatcccccttacctgtctgctcccctgtccccctcacctgtctgctcagctgtctgctcacctgtccccctcacctgtctgctcagctgtctgctcacctgtccccctcacttgcctctgttagggactgtatgctcccctgctccctcctcacctccttagacatctactctcatccctgttctccctgcacctgttggggcgtgggcgtggctgaaggtgccagctggcccacctcacctgtacatgaggtcgatgagcatctcagggtcctcctggtgttccttcatcttcaccgtgtccgtcaggatcatgtgcaggttgaacatcaggtcctggacctggagccggggaacgtccaggggccaatgagagcattaggaagtgaagggagccaaggtggtggggttgggagttatatgaaggggaggcggggcggggacccagcaggtgtcacctgctctgcgaaggtgctgtcccgcagccccatgtcctcctcagcataggtgaggatggttttgagtgaacgtcgcaggtgctcttcactgaagttctgcgtcgtccccaccagggacgagagagacatggtgacctgcatcttcacacgggcaaagttctgcagggacaggggcgggagggtggagccgggagtctcagaccccagaccccacatcagagtctgctcaacctgccgacatggcccttgcgttctttattttttttgagatgggggtctcactctgtcgcccaggctggagtgcagtggcatgatctcagctcactgcaacctccatctcccgagttcaggcaattctcctgcctcagcctcccgagtagctgggactgcaggcatatgccaccacgccctactaatttttgtatttttggtagagacagggtttcactgtgttggctatgctggtctcgaactcctgaactcaagtgattcacctgcctaggcctcccaaaatgctgggattacaggtgtgagccactgcgcccagcattttttcttttctttctttctttctttttttttttttttgagactgagtgtcactttatcacttaggctagaatgcagtggtgcaatcttggctcactgcaacctccgcctctcaggttcaagcgattctcgtgtctcagccttccaagtagctgggattacaggcacccgccaccatgcccagctaatttttgtatttttagtagagatgcggggttccatcatgttggctgggctggtctcgaactcctgacttcaagtgatccacctgcctcagcttcccaaagtgctgagattacaggcatgagccactgtgcctggcccttttttttttttttttttttttattgagacaaggtctcactcttgctcaggctggagtgcagtggcacagtcgtggcccactgcagcctcaaactcctggcctcaagtgatcctctcacctcagcctcccaaagtgctgggattacaggaatgagccacggcacctgacccccaattgcattctgagccctcctcctgctcattatgctcaatgactgtctccccctccctcactccctgtatggttgagaccccactggccaccctgaccagagccatgtgtggaccatgcctcctagcccccactcacgtggccgatctcgaagttctgtcgcatgagcaggtacagcgaggcgctggcgtgcgtgcggatggtgctgatgcggctgccacagtgtcgtaggagcctcaggcacaggtcggcacacagctccgtgtcctcctcgaacagcagctccgggaactgcccccaaggacccagacagacactgtccagcccctccccgttctggctcagaaggggactggcccaaatgaggactgcttgggcaggggtttgtgttctgtcctctttggccaagtaccactgggttcggagtcagacctgggtttaagccccttgctgtgtgaccccaggtgagtgacttggccactctgattctgccttccttccactgtaaactgtggcaaagcagtcagctccatggagttgcagagcacacagtaagtgctcaatgaatgagctccttttttttttttttttttgagacggagttttgctcttgtctcccaggctggagtgcagtggcacaatcacagctcactgcagctttgaactcccaggctcaagccatcctcctgcctcagcctccctagtagctccctagtagctgggatctcaggtggtgtgtgccatcctctctggctaacattttttttttttttttttgagacaggctctcactgtgttgcccaggctggagtccagtggcacgatcatggctcactgtaggcttgacctcccgggctcaagtgatcctcagccttccgagtagctaggaccacaggtgcatgccaccacactcagtttatttttttgtagaaatggggtctcaccgtgttgcccaggctggtctcgaactcctaggctcacatgatcttcctgcctcagcctcccaaagtgctgggattacaggtgtgagccaccgtgcctagtcctagctaatttttaatttttttgtagagacaggggcctcactatgttgcccaggttggtctcaaactcctggcctcaagcgatcctcccacctcagcctcccaaagtgctgggattagaggcatgagccactgtgctcagcctagagctgctactgtttttctaagaatcatggttgttgagtggtgctcaccttggacacaagggccctctgggtggccaggccatgctgcaagaagagggcactctgggcactgcccaggctgtacagcacaaccttcagcactgcccccaagacgctctcccgggcttctgaaagcatcaccgtctggagggaagggggtcagaaatccaggtgttagagcctagggtggttatggggaaagggaaggagagggattatggagtcagagaccacagggcactgcagttgggctcagagcacaaggcagatgctggatcaagccctacctgcacgatgatctccagtgtgtccagaaccactaggcttgcctcggttgccaggttcccttccaccaaggcctcgtgttccatttcatccttggtcctggaaggggaaaggaggtcttgggggcccactcggggtgagatcctactccatggctgagctctctccttcccctggcagcccagggggcactggctccctggaagctgttctgttttttgtttttgttttttttgttttctgagacagggtcttgctctgttgcccaggctggagtgcagtggtgtgatcaccagctcactgcagcctcaacctcccaggctcaagtcattctcccacctcagactcatgagtggctgggaccacaggcacatgccaccatgcctggctaattttttttttttttttttgagatggagtctcgctctgtcacccaggctggagtgcagtggcgcgatctcggctcactgtaagctccgcctcccgggttcacaccattctcctgcctcagcctcgctagtagctgggactacaggcacctgccaccacacctggcttattttttatatattttttagtagagacaaggtttcaccgttagccaggatggtctcgatctcctgatcttgtgatccgcctgcctcggcctcccaaagtgctgggattacaggcatgagccactgcgcccggcccatgcccggctaatttttaaatttttggtagagagggtcttactatgttgcccaggctggtctcgaactcctggactcaagcaatcctcctgcctcggcccaaactgttctgaactcagcagacaccctcctgcccacacctacttgtccacgcggtctgaggtttgcttccagtgtgtgacgctcttccgccagcgcacattctccggattcccaaacgggctcctctctgagacgcgtgggtgcacgatcacagatgcgtaaaaacacagggcacacgtgaacatcaggagaaatgcacaggcatgaagatattcaggtgggctgacccatgagggcactgggtggagcagaagcctgccgggtggacgcacaggggcaaacacgagtgacagatggggacgcacaggcgcatgtgtacggtgatgatttgtggacttctctccaggaaaagtgaggcagaaagtaagctagggatggcccccttcatggggtccccttgacacaaggtgggagcagctggtgggatggggacacgtgggtatgtcaccctcttaccacgacttcgccgaaccatttcttgtcgagctccgatggtacccagaatggcttcctctagccgcgccttcatatccagagattttttgaatgtgaggctgttgatgcgttcaaaggcctttttcccctgggggtgcagagaactggggttccaggctgactctgctcttttcggggggacctgggctggccccatccctttctttgtgctctttctcacctccgggcccctgtgcttaaagacagattgcctttttcctctaaattcttagcacttaccaaaaaaaaaattttttttttttcttgaaacagagtctctctcattctgtcgcccagggtgaagagcagtggcatgatcttggctcattgcaacctccacctcctgggctcaggcaatccacctcagccacttccatagctgggactaccagcatgtgccaccatgctcaggtaatttttgtatttttcgtagagatggggttttaccatgctgcccaggctggtctcaaactcgtgggctcaagcagtttgcctgccttagcctcctcaagtgctgggattacaggcgtgagccaccgcaccaggccctgttttaaaaaaatttcttttcttcttttttttttttgagatggagtctcactctgttgcccaggctggtgtgcagtggcacaatctcagctcactgcaacctccacctcccgggttcaagtgattctcctgtctcagcctcccaagtagctgggactacaggtgcgcgccaccacacccagctattattttgtatttttagtagagacggggtttcagtatgttggccagactgctcttgaactcctgacctcaggcgatccacctgcctcggcctcccaaagtgctgggattacaggtgtgagccactgcacccggcctccaccttccaaattctattcacaaaggcacttctgactttattccttgcctcagcacagaaacagtccacccctttcctctcagtcccacagagtcctctgcacaaagacagtccaccccttcccactcagcccgcagcacgctgggtccctgggtacatccttagcctgcctcctccatcatctcctgcccacgccctcaaaccttgtactcaaaggcagctaggcaaaggtacagcaaatccaacagacgtcccagctgggggagtgtcaggtcagtggcccagcgctgcaggagcgccggctcggtgtttttcagcacccacagcacacacgccagcaaggtccggcttgactcagcagagagggcacagcctgcgcgagaagcctggggccagagaggaatcaaagtcaatttccattttctccatgtgagatgaatcctggccaatctgtatcttgatacatgacttctctcattcaaagtggatgatgtctatggggacaagcctccctactcaccgttggtggcccctgggagatgctggcccgggagccaggggctagggggccaccagcaatggccatggccacagaggggttgatggtacccgcaatgtccccttcgccttctgtgtctgagtcaagcattgaggccagtcttgaccgctgacctgggccctctggcagggaaagacagagggaaagaaagataaacccttggtaagtgctgtccctgtctcaaatttcagaagtcttccctcatggccaggcacagtggctcacgcctgtaataccagcactttgggaggcagaggcgggtggatcacctgaggtcaggagttcgagaccagcctggccaacgtggcaaaatcccatctctactaaaattacaaaaaattagctgggtgtggtggcgggcgcctgtaatcccagctactcgggaggctgtggcacgagaatctcttgaacctgggaggtggaggttacagtgagccgagatcgcgccactgcactccagcctgggcaacagagcgacactctgtctcaaaaaaaaaaaaaaaaagaagtcttccctcacaacagtccccaagagtgggtttctggttgtctgctcctggaattcacttattttacttattttatttattattgttttttgagacggagtcttgctctgttgccccggctggagtacagtggcctgatctcagctcactgcaacctccgccccccaggttcaagcaattctcctgcctcagcttccggagtagctgtgattacaggcacccgccaccacacccggctaatttttgtatttttagtagagacggggtttcaccatgttggccaggctagtctcaaactcctgaccttgtgatctgcccgtctcagccttccaaagtgctgggactataggcatgagccatggcgcctggcctattttatttttttttggatacagtcttgctttgtcacataagctggagtacagtggcgccatcttggcccactgcgacctctgcctcccgggttcaagcaattctcgtgcctcagcctcccgagtagctggtattacaggtgcgcgccaccgtgcatggctaatttttgtatttttagtagagatggggttttaccacattggccagactggtttcaaactcctgacctcgaatgatctgcccgcctcggcctcccaaagtattaggattacaggcgtgagccactgcacttggccaattttattttatttttttcagacaggatctcactctgtcacccaggctggagtgcagtggcacaatcttggcttactgcagcctcaacctcctgaactcaagtgatcctcccacctcagcctcctgagtagttggaactgcaggtgcgtgctgccacgcccagctaatttttgtagtttttgcagagacgtggtctcactaggttgtctaggctggtcctcaactcctggactcaagtgatccgcccaccttggactcccaaagtgctgggattacaggtatgagccactgcacctggccttgatgttattactatagcatcaatcagcacttatatggtatctcctatgtgccagatgctgttctaaggactttaaaaatattcactctttcaaatcataggagctcaagaaaaaaaaaaaatcacttttttttttttttttttttttgaggcggagtctcactctgttgcccaggctggagtgcagtagaatgatcctggctcaccacaacctccgcctcccaggttctagtgattctcctgcctcagcctcccaagtagctgggactgcaggtgcgtgccaccatgcctggctaatttttgtatttttagtagagatggggtttcactatgttggccaggctggtcttgaactcctgacctcatgatctgcccgcctcggcctcccaaagtgctgagattacaggcatgagccactgcgcccggtttttttttttttttttttttttttttgagatggagtcttgctctgttgcctaggctggagtgcagtgacgcgatctcggctcactgcaacctctgcctcccgggttcaagtgattctcctgcctcagcatcctaagtagctgggattacaggcatgcagcatcatgcctgcctaatttttttttttgtatttttagtagagactgggtttcaccatgttggtcaggctggtctcaaactcctgaccttgtgatccgcccacctcagcctcccaaagtgctgggactacaggcatgagccactgcacccggcttaaaaaaatcactgttaatcggctgggcgtggtggctcacgcctgtaatcccagcactttgtgatgtcgaggcgggaggatcacaaggtcaggagatcgagaccatcctggttaatacagtgaaacctgtctctcctaaaaatacaaaaaaaactagtcaggcgtggtgacgggcgcctgtagtcccagctactcgggaggctgaagcaggagaatggtgtcaacccaggaggcagagcttgcagtgagccgagatagcgccactgcactccagcctgggcaagagcgagactctgtctcaaaaaaaaaaaaaaaatttactcttaatcatcaaaacaaccatatggagataagtactttcattagtcccactttatggacgaagaaattgaggtacagtgaggttaagttacttgcccagggtcacatagcaggtaaatggaagagctacaatttttttgttttgttttttgttttttttttgagacagagttttgctcttgttgcccaggctggagtgcaatggcacaatctcggctcactgcgacctccatctcccaggttcaagcgatactcctgcctcagcctcccaagtagcttggattaccggtgcccaccaccacgtcgagctaatgtttgtatttttgggacagacagggttttaccatgttgtccaggctggtctcgatctcctgacctcaggtgatccacctgcctcggcctcccaaagtgctgggattacaggtatgaaccacatgtgcccagcccaaaagctacaattttatcctcaacagtctggttcccaagtctatgctcttaaaaaggtaacccccattctctcccctaaaaagtctcaacagagggaggagttgtcaacaaatatatagcagatcttgccctagagtctcctgaaacaaaaggtagactgagtgtaaataaagctctagcccagtccagcctagctcaattcctgattggactgaggtgatcagcctgttatcctatctgcctaagagagggaaaggacacttctcactgggcaaagatgacattgcttcatccctatggttcttttttatacaatgtccagaatataataaaaaactacaaggcaagggatgaggcaggaaaatgtggtggataagagagaaaaagagacaacagaagcagacacatggatgatcaaatctggaagtcagcaaacagaaacttttaaagttagaagaaaagatgagcaaaaatgagacaaaagatggagaatttcaacagggaattgggatctacaaaaaaatcacatggatattttacactggaaaaaaatatataatatctgaattttttttttttttttttttgagacggagtctcgctctgtcgcccaggctggagtgcagtggtgcgatctcagctcactgcaagctccgcctcccgtgttcatgccattctcctgcctcagcctcccgagtagctgggactacaggcacccaccaccatgcccagctaattttttgtatttttagtagagacggggtttcaccatgttagccaggatggtctcgatctcctgacctcgtgatctgcctgcctcagcctcctgcagtgctgggattacaggcatgagccactgcgcccggcctaatatctgaaattaagaactcaacggatggggtcaacaggacactgggcacaacagaagacataagtggtgaactcatagacaagtgaacaaaaaacttcccagttggattacagagaggaaagaatggaaaaaacagaacaggacataacagatgtgatcaaaaggcctaatatatgtgtaattggagtcccaggagtgaagagtgaaaatgaggcagaaaaaaattcaagtgagaatggctaagaatttccccaaactgatgaaaggcatccacccacaaatcccaattttgtacttccaaccactgttataccacccccctcaacaatgcctataaatgtttgttgaaaatgagtgaatgaatgtactccaatcattttctcacttggatgttccctactttttgctcttcttagaaaataataaatggtacaataatatctcccatctattgtaggctgacaatatctcagtactacagccccccacattttcacataaccttatgaagtagttggtgttgttactgtctccattacaggggagaaacctgaggctcagagatgttatgacttaagtagtctgtcctagcactttaacctgctctgctaatcctaatgtctatactcataccagtgactgtgttctcccacctttactatcctgtgccttctgtgaccaagtccctggatcatgtgaccccatcttcccctggcccactgaccagcaaagtcatgcagccgtggcaaggtatcccgtgcaatcgatagcagtggcaggtacagctcggccacacgagccttcacagtggcctcggcgtagcgggggtcagtgtcatggccacatagcaggctgtgcacagcactgatggccttcttgtgcaacaggaatgccctatggggtaatgaggtgctcaggacagggtggacatggctcctggactgtcccacctgtcctggggctagacaggagctctgctcacccttcagcctcaggttcgagggccagtgccagctccgtcagcaggagcccagctaggaagtgctgctgccggaatggtccactcagttcgaacatgctggtcaccttggggtccggggcttggctggagaaggtggagctctgcagagtgggggaaaaatgggggatgccagcggtcaagggtcagaggtggcaggtcaccattaaagccatcttggaggtgacagaaatcatggtgccaatagccacagatgaaagactgatgttaagtcatctggaggtgacagtgggcatgggtttcaaggccagaagtgaggggctgacgttaacccatctgtgatgtaacagggcacggagtcaaaagtcagaggactgagaaatagcagatggaacactgggctgggagttaggatttaggggagagaaatcagaggttagtccttctgggaaattgctgagaatggcaagagaggtgaagggtcagaagtcaaaagtcaaacataagggattagttcacctaggcagtggtccaccgtgaaagggacagagatgagggaaccataggagatggactgaaggtgagaggttgtaggtcaaagagaggaggcagaagtgaaggcagcccacctgggaggtggtggaggacacagagggggagggcgaggctggaggtgacagggggcagcaggggaggttgagggtcacgtagtgctcgtggctgcacaggatgcgggtgaattccatgcgcagggtcagcagggctgctggattaggggacgactggagccgcgtggccacctgcaggagaggggtggccatcagtgatgtcaacattgctccgccttccatccatgccatgcccaccctgcccacgcccactcctacctgcttgtagtgggcccggaccaggctgaagacaaagccccggtccaccagggacagaaggtcactgaggaagaaagccaggctggcgttgaggtgctcggccagctccacatcctggggacacaggtgcctgtcaacccacacacccaaacctcagccccgacaggggcttggctctcaccaagatcatctgccacccctaggagctgtatcactgccccaaagcctttgtctgtgggctgtggtgactctgggacttcctggttgtcctcctcaggctgccttcccctcccatgctccttaagacaccaaggcagatatgggctaactccctgcaagatcctctcgctctctctgtccagagttcagagctggggagagactatatttcccagcctcccttccagttgaaccacatgaccaattctggccaatgggatttgaggggaaagtgaggtggccacttatatggcagaagcaggtgggtgccggggaactgccagggccaggcccacacagtgatgcctctacaacctacttaatactcagaaataagctatggttatttaaatcacttgtgactgtgttgaagcgaattagcctctgccctaactgatcgactcttaccatcatttatttttattttaattttaattaattaatttattttttgagatggagtcttgctctgtcactaaggctggagtacagtggcacaatctcggctcactgcaacttctgtctcccaggttcaagcgattcttctgcctcagcttccccagtagcttggattacagacacccaccaccacgcctagctaatttttttatttttagtagagatggggttttgccatattggtcaggctggtctcgaactcctgacctcaggtgatctgcttcccttggcttcccaaagtgctgggattacaggcgtgagataccgcacccggcctctcagcaccatttaatgtgagctttactgagcatctactctgtgccaatccctgtgaatgaggcagatgccatccctgctgcgggtccaactcaatccagtgtgtgtgtgtggggcgggggcagggagacacaaaataaacaagaatttcagatagttctatgtgcttcaaagacaatattaaattggtgcaaaagtaattgcagttttgcaattactttcaatggcaaaaactgtaattacttttctttctttctttctttctttcttttttttttttttgagacggagtcttgctctgtcgcccaggctatagtgcaatggcgcgatctcggctcactgcaacctctgcctcctgggttcaagcgattctcctgcctcagccttctgagtagctgggattacaggtgcgcaccaccacacctggctaacttctgtgtttttagtagagacagggtttcaccatgttggtaaggctggtctcaaactcctgacctcaggtgatccgccctcctcggcctcctaaagtgttgggattacaggcgtgagccaccatgcccagcctataattacttgtcaccaaccttaacagacgggggtgacattttcagagatactgaaggataccaaagagccatggggagaatggcatcctgggttaagggaacagtcagtgcaaaggccctgaggcaggatgtgcctagcaagtccggggaacagtgaggtggctgatgtggccctgaggcccagctggtattcgttctgccctcatactctcttgagccactctgaggcctcacaagttagcctcagtggccctcaaatccctgcaacccggccaggcatggtggctcctgcctgtaatcctagcactttaggaggctgaggtgggtggatcacagggtcaggagtttgagatcagcctggccaatatggtgaaaccccatctctactaaaaatacaaaaaattagccaggggtggtggtgggcgcctatagtcccagctacttgggaggctgagccaggagaatcgcttgaacccaggaggaggaggttgcagtgagctgagattgcgccactgcactcccgcctgggcgacagaatgagactccgtctcaaaaaaaaaaaaaaattagccgggcatggtggcgcacccctgtagtcccagctactcaggaggctgaggcaggagaattgcttgaacctgggaggcggaggttgcggtgagccgagatcgtgccattgcactccagcctcggggacagagcaagactccatctcaaaaaaaaaagtggattatcacaggcattgttcttctctggatctctttcttggggtagtttcctcaccatctggatcagcccctgggaatgtcagtctttgggaaggctccagtgagacaaggccagaacctttgagaccagcttggaggtcacatgtgattgtgtaagggttggcctgggccagaacgccatttcaaaaatctggaaagttcccagcaaatccagaggtcccatttctccttagacaccaggccatctcctggcatgggaacataggaagaccccatctctacacacacacacacacacaaaaataggtgggtatggtagcacgcacctgtagccccagctactctggaggctgaggtgggaggattgctttagcccaggagtttgaggctacagtgagccatgatcacaccaccacactctagtctggacaacagagcaagaccgtgtctcaaacaaaaacaaataaaaaaacaaaaacaaaaccacacacaaaaaaaccccagtcaatctggccaggcatggttcacgcttgtaatcccggcactttgggaagccaaagtgggagaagcccttgagctcaggagttggagaccagtctgggcaacatagtgagaccctgactctactaaaaaaaaaaaaaaaaaaaaaaaaaattgccaagtatgttggcttgtgcctctggtcacagctacttgggaggctgaggagagaggatcccttgagcccaggaggtcaaggctgccgtgaactatgatcgcaccactgcgctccagcctgggcaacacagcaagaccctatctccaaacaaaaacaaaaacagccaatctggacatagctgagccacattcctgcagggtttctgttggctggattgagtgatggtcacccctgttaggtgggacatctgccctctgctccaccataagccccactttcccagctgaaactggtattgacagtgaggggtctggagctggtggctcagattcaaaagcctcattctgccccttctcagtcgtgtggtacaaggttaagctaccactcattcgatgcctcagtttccccatcagtaaaatggagataacaataatactaacttcatgggttgttgtgagaatttaatgatacgatccaaggccgggcgcggtggctcacgcctgtaatcccagcactttgggagggcaaggcgggcagatcacctgaggttaggagttccagaccagccaggccaacatggagaaacactgtctctactgaaaatacaaaattagctgggcgtggtagtgcatgcctgtaatcccagctacttgggaggctgaggcaggagaatcgcttgaacctgggaggcggaggttgtggtgagccaagattgcgccatcgcactccagcctggacaacaagagtgaaactctgtctcagaaaaaaaacaacaacaaaaaaatgatacgatccacataaaatgcttagatatacagtaagtgctcaataaatgctccatattattactattatgattagtattgcctgcctagcccctgagggcattggaattggtaatccagggcctgaacaagtccactgtcagggtctcagaacatcaacatccatttattgagcacttgctgtatactctgactgtgctaagggttaatggatctgccttgtcacttccccgctcccaccaaccctcatttccttcctcattcactacaatctagccatccttactgctctactgttagcccaagcatggtcttgcctcagggcctttgcacctgctattccccctgcctggaatgctctttccccagacattgcatggaatgatcccttactttcttcaagtctccccttaaaagctacacaagggtaaggatttgggtctgttttgtttattgttatattgctacacccagcacagggctgtgcacgttacaggcacttaagaaacagacaatgaatgaacggatccacccagcaaagtggattcctggtcttacggccaggagacactgggcaggattggcgcccccacctggctggctctatgtcctccctcaggtttcttcccacattgagaccctgcatctctcaccttgtggacacgggtgatgacctccaggcccacagagcccaccaaggcagtgatgtcgtccaggaagcgtccggggaagcgcagcttgcggggtgtgtctagtcgctggccaagcagcaggtgcagcgccatactcttcacctgggggtggggtgagagggctgtgggtgggatttgaagggctgtgggtaggacttgaagggctgtgggtggggcttgaagggctgtgggtggggcttgaaggactgtgggtggggcttgaagggctgtgggtggaggaggcttgacaggaggggcggggctttattagcaatggaggtgggctgaaggtaggtttgagccctgtagctgcaggtagaagctggggcctgagggatgtgggtggggcttgtgacctatggatggggcttaagaaagccgtgggcagatcctgtgagcatcccaggcaaagtgtagagagtgggaaggctgagaggatgtgggaggggcttatgcgggtctccccagggcaagtcagaggtgggacaaagggtggggcttgaggcactggatttgaagggagctttattggaggcccagaggggatgcagccagcaggccctgggaaggaggcttcaaataacctattgaagagttttagggatgtgtcttaccttgatcagaaagctttccctctttttttttttttttttttgagatggagtcttgccgtcacccaggctggtgtgcagtggcataatcttgactcactgcaacctctgcctactgggttcaagcgattctcctgcctcagtctcccatgtagctgagattacaggcacgcactactacgcccggctaacttttgtatttttagtagagatggggtttcaccatgttggccaggctggtctcaaactcctgacctcaagtgatccacccgcctcggcctcccaaagtgctgggattacaggcgtgagccactgtgcctgaccacagctttctctctctatccaggaatatctcctgcaggatgcaggtctcctgtctaggtgagggtctcttaatggtttctctccttaaagagtctcatggggaagggtggctctctctaaaggtggtttcaggtacagtctctccagggagacaccaccttaagtgcctctcacctccctaggttgtgggggggggtctcttggggccatttctcaaatatctcaggtgcaatttcagggggcttctctctttttttttttttttttgagacagagtctcgctctgtcgcccaggctggagtgcagtggcacgatctcggctcactgcaagctcctcctcctgggtgcacgccattcttctgcctcagcctcccgagtatctgggactacaggcgcctgccaccactcctggctaatttttttttgtatttttagtagagacggggtttcaccgtgttagccaggatggtctcgatctcctgacctcgtgatccgcccgcctcggcctcccaaagtgttgggattacaggtgtgagccactatgcctggccagggggcttctctctttaaaaaaggaaggggctccactgggggtctcttgccaccaggcagggaggagggggtctcaccatgagctggaagaagaaccaggcgtgctggaggatggcctcgcgtacggcactgctgctgaccacccactgcagagccagctcctcgtgaagcagctggggacagaggcaggggtcacagagtgcgaggtgccaccccttcccgtaccccctctggagacatgccaggggaagatgcagctggagggctcggggttagtgcagcaggagccaggcaggaggagggggacaagaggagtggaagtgccctttccctgggctcgccagacccccctggactctggatgggggaggagcactggacccctttgctggggaccaggacaaaaatagcgtcatccgcacctccccccactaccttctgcacagtgggtctcagctgggtggctggtggggccgaggaggaaccctcgaggtaggaggaggctcggctagagttgcagtcgatggcctatgatgggatgtgatggcgaggagaaggttagtgtggatgaggtgaaggggtatgtggttggaggaaagacgtgttcacacagacagggatggggaaaagaggtaggttagtgtgaatatagagagagaaatgcttccacatggatggaccagggccatggatgccaatggggacaggcaagaaagagagatgggccggcgtgggttgggaggggaggctggttggaatggccagggtgctgtgggagtagacggggcagtggaggcagggacaaataaaagagtcgctggagagagctgggtgagtcaagatcaaggtgtgtgggtatgggagaagaacgtgaggctgggcggggtggctcaatacctgttatcccagcactttgggaggctggggcaggaagactgctcaaacccaggagtttaagatcagcctgggcaacatagtcagacattgactctactaagacaaaaacaaacaaacaaacaaaaatatatatatatggctgggcctggtggcgtgtgcctgtagtcccagctgctcaggaggccaaagcaggaggattgcttgaccctgggacttggaggttgcggtgagctgtgatggtaccactgcactctagcttgggtgacagagcaagactccatctcaaaaaaaaaaaaaaaaaaaaaaggaggatgctgtaatcctagcactttgggaggccgaggcaggtagatcacgaggtcaggagatcgagaccatcctagtcaacatggtgaatggtgaaaccccgtctctactaaaaatacaaaaattagctgggcgtggtggcaggcacctgtaattccagctacttgggaggctgaggcaggagaatcgcttgaacctgggaggcagagcctgcagtgagccgagattgcaccattgcactccagcctgagtgataagagcgagactccgtctcaaaaaaaaaagaacgtgatggaggaggtgagaataacaatgaaaacacagtacgccagtgaccagtgacagcagtgcaaccacaacaggcaggaggagtgtggatggagtgggaccgagaacacacgaaggctgggaatgggtacatggtgtgtggggtgaaggcagaggagatgaaatcagtgtagacagcaagaatgtgtgtggccagagaaggtgagggtgagtgtagacgaggtgtagagtgtgaccgagtcagtgagtctagaggacagagaggaggatgcagaggtggaggagggtgagtgtggacagaggaggttaaacacaagatggggaaggaggagaaagacaaggcaggaagataaggacagaggaggtgagatgttggtgaggtgccaggaatagcagagagagcccaaggttccaggcctggccctgcccaagcctggcttgggcctcagtatccccatctgtgaaatgggtataggcagaggagttcaagctccactctcgcttcctccttcgctggttagggggtgaggctgctcgcaggaacaggaggtctgatgacagagacgacccaaccctgggacctactctgacacttgagggctctctagctaccccagtcccagccataccctggcaactcactgtgcaccgtgagggccttccattgaaaaggcccagcctcagtgtcacccagatttccagattcccagcaatccaaggaaatgactgcccaaaggccccccctgcttgttctgctaggagtcccctgggcctgtcatagggtacaggttaccttggtgatgggcacagagctggaataggccctagggccaagtgtgtaaggaagcaagccctgtggcctcctctctgtgcgtacagtcctctgaccttggtcccaatatttgtacatgcctttccctcttcctgaacacccacacccacccacccttccctagctgactctatcttacccttcgggtcccagcaaaagatgtcactcccctggagaagcccccaagaccacccagagggaagctggtattcggttgctacttgcttcctttccacgctgtgtgatcatatacttatgcatttgtttgatccgtgtctatttccccaactagctggaagctcagggtcaaggccagaccaagaatctatcatcccaacaaaatcccactgcagtgccctcagccctaactcaagcacaggctcaggactgctgggggagcactatattttgagtccaaactgcatccgaaaatttggagtgttatctccattttacaaatgaagaaactgaggctcaggaagatgcatccaattgctcagagcatggggtgagctcatagcagagctaggacttgaacccaggtctgtttggaggcaaagcgtccccctacaccaggtacctggaaagaggcagggtaaggggagctctttgtctaaaatgggataggggagccgagaggttccattccagccctttgagagtcccatcatcaggggtggattaaagggaggtgaacaggccatgcagggcagtgaggttatgggtgactggatttgcacttcgtttgcatgcgatttgcatattacccctgtgccttctgtctccatctgagactgtggcctatgtggcagcaaaaagccagttaggatgacccagtgatacctaaacacagacttcacagccccaaacaaaggcaggagaggggtctgccacctccttcaggcagcccccctaggttagtcagatgcagccaggaaggtgggaggagctcatgctgaggtggtgtcacatgagtgcagggacaggtaggaagggcacctgtctggggtcggccccacaataagggggcgcccgccgcagcacagccttactgcctcctggagcataagcggaattcacccaggagtgtgagcgatcgatgccctggagatacacggagaagtggtagcatccccagtggagggcagggaaagcagcatgaaataccaagcgtggacatggttctggaccatacatgtgcccacatgtgcacctacacacaatcctgaaaaatgtgcacgtgtatataggtccattgggtgcatgcctttacataacttgtgtatgtgggtccacaggtgcatgcatacacacccctgtaagtctgtgcatggggtgcatgtgtatacacacccgtacacatatatgcatcaggtgaatgtgtatacagacccaggtacatacaggcacaggatgactgtgtatatgcacctgtgtaagtatatgcatggggtgaatgtgtatacgcacccgtgtctgtatatgcatggggtgaatatgtatacacacttgtgtccacacatgcatggggtgaacacgtatacgtgcccatgtacatatatgcatagggtgaatgtgcctatgtacctgtgtaggtatatgcatgtgggggtgaatgtgtatatgcacccatgtacatatatgcatggggtgaatgtgtatatgcacctgtgtatgtatatgcatggggggtgaatgtgtatatgcacctgtgtaggtatatgcatgaggtgaatgtgtatatgcacctgctacactaggtacatattgctctttgttcagccacgccaagctccgccacccatcctcgggtcagtcacggagtagagctcaacacaaagtctgatccataccccacaacctgtgacagcccagcccaactctgctgcccagagtgacgccttcattcacgttgtcgtctctgttgtttcccatgcttcatcaacagattcttcgcccacacacgtggcaaccacaaccactgaggctggagattccagggcccccgttgccctaccttgctggccaggatgcgggaaacctcgtcatccacagagccaggggccacggcgaggtcagggttgctgctgctgatgctcttggaacgcgccaggtagaggcttgcggggcgaccagagccacgggccagtgtggcagcctgcactgtcactggaggggcccctgaggatggagtgaatagggtcaaccacccacccacctgatgtgatgcctcccagtcccttcctactcagctaatctctgcaaaatcactttccttctctgagcctctaagttcctcatctataaaataggcataatggctgccgcctcacagagattgggggggcactgaaaaactgagaataggccaggtacagtggctcatgcctataatcccagcactttgggagggcgagccaggaggatcacttgagcccaagagttcaagcccagcccagccaacatagcgagactctgtccctacaaaaaaattaatgaaaaaattagccgggcatggcagtgcgcgcctgtggttccagttacctggggaggctgaggcaacaggattacttgagcccaggagtttaaggcagcagtgagttatgatcgtgacactgcactctagcctggccgacagaataagatcctgacttttttttttttttcttagagagtttcactcttgttgcccaagctggagtgcaatggcacgatctcagctcactgcaacctctgcctcccgggtttaagcaattctcttgcctcagcctcctgagtagctaggattacaagcacgcaccaccatgctcagctaattttttttttttttaatgagacggagtcttgctctgtcgccaggctggagtccagtggggagatcttggctcactgcaacctccatctcctgggtttgtgtgattctcttgcctcagcctcccaagtagctgggactacaggcgtgagccaccatgcccagctaatttttgcatttttagtagaaacggggtttcaccatgttggccaggatggtctcgatctgttgaccttgtcatctgcctgactcagcctcccaaagtgctgggattacaggcgtgagccactgtgcctggcgtattttattttttgagacaggctggtctcaaactcctgatctcaggtgatccacttgcctcagcctcccaaagttctgggattacagccgtgagccaccatgcctggctgaccctgactcttaaaaaaaagaaaaaaaaaaagaagaaaaaagaaaaaaaccctgagaataatgcctgacacatagggattggtgtttatttggcaaattaaaaaaaaaaaaaaatccaactctattgagggttcactatgtgctaaccattttgtgtggattactatgtcacttactattaccagtgcccccatgaggtgggtactattattatccctgttttacaaaaggaaaaacaggctcagagaagtgacgtcacttgcccaaggtcacagagactgtaggtggcagggccaggattcacatctaggcagctcagcttcagtctccgctccaagctactgaagaggcttgctgactatctgaatcgttttccagccaagcacacagaagccacaccccagggatggggcaaaagtgggcaaaacattatctctcttgcaagttgctcaaaccagccaaggcctgtgaggcctcagggcctttgcacatgctattctcactacctggatgctcttctcccagatctttctttcttatttttttttttttgaaacagggtcttgctctgttgcccagactggagtgcagtggcgtgatctcagctcactgcaatctccatttcccgggttcaagtgattcttctgcctcagcctcctgagtagctggggctacaggcgtgcgccaccacacctggctaatttttgtttttgtttttgttttttgagatggagtttcactctgtcacccaggctggagtgcggtggcatgaccttggctcactgcaacctctgcctcctgggttcaaatgattcagcctccctagtagctgggattacaggcacctaccaccatgcctggctaatttttgtatttttagtagagacggggtttcaccatgttggccaggctggtcttgaactcctgaccccctcaagtgatccccctgccttggcctcctaaagtgctgggattataggcattagccaccatgcctggccccagctaatttttgtatttttagtagagacagggtttcatcatgttggccaagttgatctcgaactcctgacctcaaatgatccatccagctcggcctcccaaagtcctgggattacaggcgtgagccaccgcacccagcctcttctcccagatatttctcgtctcacagggatttctacaaactcaccatccgggaggctgggctcagtgccaggaaggcgaaaggcgtagtggacgtaggcagccagctgtgggcagtgaccgcgggcatcctgggctgcctccaggctccggtgaacaaggctgactacatgggccattgcttcaaaggctccacggcccaggttcactgcagggcagagcagaggtcaagttccagggcccaaggcctctcacctccccgcccactttccaaatataaagacatcaggatttgagggatcatgtgctcattaaggggtcacaaatttttttttttttttttttttgagatggagtcttgctctgttgcccgggctggagtccagtggcatgatctcggctcactgtcacctccgcctcccaggttcaagcaattctcctgcctcagcctcccgagtagctgggattacaggcatgcgccaccacgcccagctaattttgtatttttagtagagaaggggtttctccatgttggtcaggctggtctcaaactctcgacctcaggtgatctgcccgcctcggcctcccaaagtgctgggatgacaggcgtgaaccgctgcacccgggccaaagggtcacagaagaccttctctgggtgcaggggactggaggtcatttttcagatgagaaaaatggccagagaggtaaatgggcttatagaagatccctcaggacctcaggactgagaagccatgtggatggggaaactgaggtctgaggccacattcgcttaccaatctggccactgatgatcgggggcctgatgaccagacgcacgagcttgtccagcacgtggtgggagaaggccacaaggggttcggggctggccaggcgcagtgctgcaagactggcccgcagctcctgctccacgttgccctcgctcagcacagtgtccttgagccggaatgggaaggctccctcctccaggacgtgcaccagggtgaagaatttgtccaggtaggggtcctgggtagggatgtggagtgagcagggtggggcctcagggaatgaagaccacccctgcctgaatcagcagcttcccttaaagctgggtccagctgaccaaagtcacgtccaaggcctgaggccagacctccccggccatcggcaactgttactcaatcgtagggcaggcaagaggggagcagggcgggactcttggttcccggcccaccccgtacctgggggtgcacagaggacacggctgtgagctccacactgaacacgcccttgtgaccgtccacccagcgcatgcccggaagcgccacctgtgggagggaggcaccaggtgggcactggtcagccctccctgactgatcaggtcacccagcggccccagccattgcgacactgcagcgtgagtgtagcccggtctgggggtgcagccaagcaccctgcccccagccctggtcccagtagactgagagggtccactgggcaggctggaaatccacatgccaagacgggggcagagaatggagacacagggtgaatgaatattcattgagtaggtcaggaaacaggataggaggatttgaggcctagggtcattaacaatggtgcattcatggggaatgataaggtactacgagggcaggggacagtgatcaggaaggcagtcagggtggctaaagtgggaatggagcagagaggcaatgggaatctttggggaggacatgtaggacacagagaggcattaataggggaataatgagctacacgggggccctggaggcaccagtagaggataacaagcctcccaggattgacaggaaggaaggcaggtgactcgggagtgcttctggggacagtgcattggcaggcaggagctccagggcacatacatcgggtgtgagcacggaatagctgggcggcggctggtccacagacactgggagacagaaggggccggtcctcaggcgcccgtgctgcagcagtgggatccactggggagaggctggaggtcaggtctgcggccaggttgggggacgaggagggctcagggggagggagggaggggacggctcacagtaaagcccacgggtgtctccagggcagtgcccggccggggctggcagctgacatggtagaaggtgaacagcaggtgatggttctctgtcacgcaggctggaagatgcagcttgaactcctcgtagaactcgggggacctggcagaatcgggctgggggatctgctgggggctggggtccccactgtctgccccatcacctctgccatgccacgcccttattgctgctaggccccactgtctctgctgtctgcctcagcttccctcattagcactctgggagcctctacctctcttcttcctgtcccccatcttcccatcgatgctgccttatgtgtatatataagggacatcctcctacccccatgagtgcccccaagttcctcacgtgtccccctacatacttgttatggtagaccaccggtgtgaaggcctcgcgggtaaattcactgcagctggacttgccaaagatgacctgggagagtggattcatgagggacccatgggggatgccctaccccccttccctggggcacagccactgaccggcagagcctggctggggtcctcgcctgtcatgtactgcactcgcacagcaaggttgcgcacggagccctggcggctgctgaagttgaggctgtgcgggtacacgtacagcaggttcctgtggggggcaggatgggggtgtcagagggacaggggccctgaaggtgcacatacaaggctggggtgatgggacaaggctggctgggagcacagacagtccaggaagagtaggtcatgaggctggggcattgagggcccggtgagaggtaatacaggtatcagtcaggagataggacagagggcagagggtgggggacaagcgagcaccctaaaaacacagattgggaacagtgtggtagagggtgggaatacagaaggacattggaggcactcatggggcacagtgacacacagaaggcagagaatagcgaggcactcagggccagagttccaaggtacctcaggtggccagtggtcaagcctaagccccacccaagggcctgactgcccttcccccaggaggtcactagagttatgtggcctgtttctcaggtggggaaactgaggccagagtccgagtcctgcctccttcccccaggggcaactctgtgcaagccttgacccctctctgggcctcagtttccctatgtgtataatgggcacttcaggccttccagctgagcctttgtaatgatactgatgatgataaataacaacaatgacaataattgcaccaaacactattactacaacaatgaaataatcgcgcctactgtgtgccaggctctgttctaagcactcaacatgaaataactcatttacttctcacaagtagctcatgaggcaggactaacatcaccgccattttacaagcagggaaactgaggtacttgcacaatcacccacggagtaaaatggcagtcagtggtgatctgggcatatgcaggtcttggagatcaggctgtgtgaccttgggagagtctctgccacctgcacctgcccccttggatactaaccaggccaataaaagcccccacgtggcaagtatgtgggaggggaacaagagcagatattgtaatggcaggtcaaacagctcagggcaaaccatcaatgcttataaaatctttactgttattaccatcatcattgcgatgcctattcatagatggagaaacaggctcagcatggtgagtctcaggaactcccagcagggtctggggcccgtcctctcccaatgccccccacccacacctggccctgagccccaggaagcgtgatcccggcgtggcctagccggacattcgcctgatgcaactatcgcaccactgccaggcccttgtgcaatgcggggcaccaggtcggccagttaacgattgactggggatcagtgggggtatgaggcataaaaggcttcagtgacagtgctgtggctataccttagaccctcagtcatgccagtgcctgctctgtgcctgctctgggccctggcaatggtgacccggcctgcctcagcggcccccatgggcggcccagaactggcacagcatgaggagctgaccctgctcttccatgggaccctgcagctgggccaggccctcaacggtgtgtacaggaccacggagggacggctgacaaaggccaggaacagcctgggtctctatggccgcacaatagaactcctggggcaggaggtcagccggggccgggatgcagcccaggaacttcgggcaagcctgttggagactcaggtgggcaccgtagctgcgacactgtggggtggccaggagtccaaagaggagttcgtgtctagggtaaccaaccatcctggtttgcccaggactgaagggattcctgggatacaagattttcagcgataaactcaggcaagtccttaggtacacaaagatgagttggacatcctactagtgacccactgtttattaagcagatggaggaggatattctgcagctgcaggcagaggccacagctgaggtgctgggggaggtggcccaggcacagaaggtgctacgggacagcgtgcagcggctagaagtccagctgaggagcgcctggctgggccctgcctaccgagaatttgaggtcttaaaggtaaggagctcccccaaccctagtgggctgagaccctgatttccggccagaactcgcttctgcaccttgagtcccaaagacctcccagatcagcctcccagctctgtggcctctaccctgcatgtccccagacaaaactcaagtccttttgtgtgcctcagtttcccttttgtgtgcctcagttgcaaataagggcaacacctgatatctcacagtagggccaggtactcaatgcaggtaaaatattcagcatggggcgggcacacagttggtgctcaataaattctttttttttttttttttgagacagagtctcactgttgcccaggctggagtgcagtggtgtgatcttggctcactgcaacctccacctcctaggttcaagtgattctcctgcctcagcctcctgagtagctggaattacaggtgcaccagctaatttttgtattttttagtagagatgggatttcaccatgttggccaggctggtctcgaactcctgacctcaagggatctgcctgcctcggtttcccaaagtgctgggattacaggtgtgagccactacacctggccaataaattcttactactagagaaactggtaacattttgtgagcacccagtaagtacccagcactgttctatgccctttaataatccatatgatggccgggcatggtggctcatgcctgtaatcccagcactttgggtagctaaggtgggtggaacacttaaggtcaggagttcgagaccaccctggccaacatggtgaaaccccgtctctactaaaaatacaaaaaattagctgggcgtggtggcacatgcctgtagtcccagctactcaggaggcttaggtaggagaatcgcttgaacctgggaggtggaggttgcagtgagctgagatcgtgtcattgcactcagcctgggtgacagagagagactcaaaaaaaaaaaaaaatccataggatgttcatcacctccccatgaagtgagtcctattttatccccattttacagatggggaaactgaggccaaagagcattgttgacttgctgggtcacacagatacaatgaggggctggggcagagggtcaggggatgggaggtgaggtggctgtcggctgaggtttccattctgacccccacaggctcacgctgacaagcagagccacatcctatgggccctcacaggccacgtgcagcggcagaggcgggagatggtggcacagcagcatcggctgcgacagatccaggagaggtgagcctggcaggggtttggcaggcagggcagttggatggggggcgcacagggcagctggaaaggggccccctcacctgggctgagccacatctccctccccagactccacacagcggcgctcccagcctgaatctgcctggatggaactgaggaccaatcatgctgcaaggaacacttccacgccccgtgaggcccctgtgcagggaggagctgcctgttcactgggatcagccagggcgccgggccccacttctgagcacagagcagagacagacgcaggcggggacaaaggcagaggatgtagccccattggggaggggtggaggaaggacatgtaccctttcatgcctacacacccctcattaaagcagagtcgtggcatctcacccagggtgtctgtgtgtgtccttggcttagggagaccccacccagcatgatgtatgaatacctcccattcaagtgcccagctgggccccagaggccgtacctgtagctggtatggggggcatagacttcgcgggcggggaactccagaatctccttggtgggccggcccctggggtccgggtagggcttgatatgaagcagctcaggggagaggcagaagtggggattttcaggagccggagaaatgtcgatcttgagctgggctgggaagggaagaaccggtttgcacctgcctgggagcctcctggctcagcccaccctttctgggctgtgtagtcagggcagactctcccatgatgttctctggggactgggggctgtgtccctcaggcgccaaggccagaaattgccctcaactctgctgtctgtcaccctaaattttttttcgtttttgtttttcttttttttaagtggagtcactctgttgctcaggctggagtgcagtggggcgatctcggctcactgcaacctctgcctccccagttcaagtgattctcctgcctcagcctcccaggtagctgggattacaggtgtgtgccaccacacctggtgaatttttgtatttttagtagagatggaatttcaccatgttggccaggctggtctcaaactcctgacctcaagtgatctgcccgcctcggcctcccaaagtgctggcattacaggtatgagccatcacacctggcccccaggctggtcttgagctcctgggctcaaacaatcatcctcctgcctcagcctcccaaagtgttggcgttacagacttgagccactgcaccccagccttacccctacatttgatcaactctgcccccaggacccctgcctgccccgctgccattaaccacctattgacgctgtatccatcttatttattctgcttcttgtctatggtccccattagaagctgtagccagcccctgaggtcagggatttgtccatcatggtcatcgttgggtctctgatgcccctggcacagtaggtgctctcagtgtaggtttgttgagtggctgagtgagagtgatacttcttgtgtatggggtgtgccacgcaccagtcacaggacgtagtcgccgcagcagggacgacgggcgcctcatgtcagccaggaacttgaagaggtcctcgtcactgagtcgctcagcctcctacatgggacccactcccgtcagcctgggccagggggctaggggtccccagggctaatgcagccagcggggagtgggagagtccctggccccagggtaggacacctgcttaaagaagtttgtgacagttagcgtggctggacggaagccagagaagctgcaggcgtcgtccccactactcgcccggtcctggggcccccgacggcggcggtctgtccaggctggccggcgctctaggggagggaatgacaatgacaaaagggggaccaagatgaaacagggagactcaggggcggcacagttcggccagcagagggcgcaccccctcgccccgtagccccgccccaggcctgtcagcaccaccctttagccccgccccaagcctgttagccccgcctcctcaccgccctccgagtcagagtcccggtccagctgcccagcgctgctcacgatgttggccaagtgcacggccgtccaggcgaagggcatgcggtagcggcccaggcgggtgcagaactgctcggccgccaggcgcagcttctctagcttctctttgttctgtggggagaccccgtcccctgccagctcagcatcctagccctgctgagtcagggatctgttgcccctagtccagcctccacacgcttaccttggctgtgtccacttctttcaacaccatgtaaggctcacagcactcactgatgtccccttgctgaagcaccttctccaactgcggggcagatgaatgaatccagtgaggcgctgcccgaacgctctgttcccccgtgctggctccccagcctcctggacccctcatgggccctcggacactcctaacatatgaaggcctttgctccaacacctcccatggctcccgctgtccttgggatcaagggttagtgttggcctgcctggtggctactccctcccattcttcagatctacccctaacctccaagcctacctttagctggtgatattttccctaaatttacttatttatttacatttatgtatgtatgtatgtatgtattatatagagacaggggtctcgctatgttgcctaggctggtctcaaactcttgggctcaagtgatgcccctgcctctgcctcccaaagtgctgggataacaggcttgctgtgaatttttttttttagacagagtctccctgttgcccaggctgaagtgcgtgatgggatctcagctcactgcaacctctgcctcctgagtttaagcaattctcctgcctcagcctcctgagtagctgggattacaggcatgacccaccacacctggctttttttttttttttttttttttttttgagatggggtctcgctctgtcacccagacggaagtgcaatggcacaatctcggctcactgcaacctctgcctcccgggttcaagcaattctcctgcctcagcctcccaagtagctgggactacaagcgcctgctactacgtcccgctaatttttgtatttttagtagagacgaggtttcaccattggtcaggctggtctggaactcccaacttcaggtgatctgcctgcctcggcctcccaaagtgctgggattacaggcgtgagccaccgcgcccagccaatttttgtgtttttagtagagaatgggtttcaccatgttggcaaggttggtctcaaactcctgggctaaagcgatcctcccgcctcagcctcccaaagtgctaggattacagttgtgagtcactgtgcctggccttccctacatttttctttgttagtgtaaatagaggccactctgggcatggctctgagccatgaggcctagactccaatcctgaccactcaggggctgtgggaccctgggcagtgggaccctatccactctgtgcctcagtttccccatctggaaaatgggaaccatggcacccctccaccttaggccctgtggtgaggactgaaggagggatccctgtgaagcgtgaccatagcagcacctgcctgtggatactggattcatttcatcattgcaaactaatagaaggttttgagaaaagaaatttgacctccctcccagaaacagaaaatctcaaatgagggtgccaactatgtctttcatctgtccacaaacttcccaacagcatctcacccacctccgaggaccccagcctgtcacatgtgcctagggatggcttttctccccaggctgcccacgtatagttatcagctcaactgtcgcctctccctggaagcccttggtgatttctccccacctgagttggatcaggggcctcctccctgcctgtgtttcccccacaacagccctgattacccttcttggtgatgtatctgtctcattctgtgaaggcagggactaaatcagtgacattcgccattaccacccccttgcccagccccagcaggcaccttgatgaccaggaagatgtcaggtgaggggtaggtcacagagaagatggcagagcgggccagggtggagatggcagggtgggtgccatgagcccgaagcagccccttcatggagtccgagttcaggtcgaagtagaagttctccgagatctggggacaccagaggcagctgggccaccacctctgggaagcccacagccccccaacaaggagaaggaaggggaggaaagagaaaaaagggcctcctaccttctttttctcccgcacatcatacagagccaagatcccaaagatgggctcaatttcaatctcgaacctacaagtaaatgggagggagggggctctccttaacacttcccgctgtccacacaccccactccctcttgaggcccaaggtggggggcatctgactcccactgggccacatggaaccgccacttaagggcttgcagaaaaggtacatctcattttgcaaaaggggaaactgaggcactgaagttttttgttggtttttttttttttgagacagagtctcgctctgttgcccaggctggagtggagtggtgcgatctcggctcactgcaacctctgcctcccgggtttaagcaattctcctgcctcagcctcctgagtagctgggactacaggcacgtgccaccatgcccagctaattttttgtgtttttagtagagacagggtttctatgtatgtatttatttattatatagagacggggtctcgctgtgttgcccaggctggtctcaaactcttgggctcaagtgatgcccccgcctctgcctcccaaagtgctgggataataggcatgagccatcacgtccccggcttgctgtgaattttttattttatttttttagacagagtctcccctgttgcccaggctgaagtgcgtggtgggatttcaccatgttggccaggctggtcccacccgcctcagcctcccaaagtggtgggattacaggcgtgagccaccgcgccccgccgacactgaagtttttttccccctccctacaccctcagtaagtaactcacacagagctcctcctccctgcaaccacggcccttgttccgttggcatgggggcagttttgggctcaacaatccccacatcttgaaattctcaacttccgggtttccccatccctcctttctggggtgtcatctgccgccattgtcactctgcacggagttcccatctcgctcacctgaacggccaccataaaagtccttccctgtcttactccaccttgctggcctccgctcaccacgcacctccaaactgaaacactgagcactccccgttacaccccttccatcctctctattcagccagctcctcttcctcactgggtctccatgtacacgtccccctgcaagggaagctgtcccagatacccgctcgcacccctcaagctgggccaggggactcctccaggactctaggcactttcagcatcgcttatcccggctctgtgtggtcatcgcatggttatgtgtcctgtatacagtagggacttcataaatgttttatttttgtttctttgtttgtttgaggctggagtgcagtggcacaatctcggctcactgaaacctctgccctccgggtcaagagattctcccgcctcagcctcccaagtagtggggattacaggtgcctgccaccacgtctggctaatttttttttttttttttcagtagagatggtgttttgccatgttggccaggctggtctcaaattcctgagctcaggtgatccgcccgccttggcttcccagagtattaggattacaggtgggagccaccgtgcccggccaataagtgtttgttgaatgactggatgagcccacagagccaggtcccaatccttgtgtttagggcaggaggcccacccaggcctcaggccagaatggagcctccctttcctgccccgatccaggcaagaactcggggtggggagcggcagggccaggctcaggtccaagtccacatcctgttcaactctgttcccacgcacttctgctgctccccgggggctggtgtggaggggccctgggcggctgagagccaggcccagggtcactagcacccgccccaaagcctcccggccaaaccctggatcccagcagcagagcaggcaagcgccagactccagccttacaagttgtatggtcttggcgtcatgtcaccactctgtgcctcagtttccccacctgtgcccacttcatgaggttgtggtgaatataagacgggttcatatacatgaaaggctgagaactgatcctggcatacaattggcacttaaggattggagactcgggataatgaaaaaggaagtcttccttcccccataaaagcccatacataggtggccacataggtgacagggccgcacacggtaatggcactactcatgtagtgtgtaccccgccggaacccatgtggttgcttcacgcatctaagaagagagacatgtcagtatactcacttgagcgacagacacttgaccaagatcctttgtccaaagtgctcgcggggtggctctgggcggctacagcgttccacggcttcatcctgccaagagtggggggtgggagctgggcgggaggagctgggacatcctccaggaagggtctggaatgcccagcctcagaccagctctaccccagcctgactaaccgtctttccatccctgcctctgagcctttacacgtgctgttcccctgcctggaatgcccatcttctcccactcctccttgtctcgctaatgtctgctcactgttcatatatacttctactatatagaggtatatagtaggtgtccatatatagaagcttattttttttttttgagatggagtctcgctctgtcacccatgctggagtgcagtggtgtgatcttggctcactgcaacctctgcctcccaggttcaagtgattctcctgcctcagcctccggagtagctgggattgcagcttagccaacacttcctccaggaagtcctccctgacccctgaggcctgggcaggcacctctttcgggtgcccacaatgtcctggtgtaaggagccatggtggctgggacactgaggaccgtgtgagggacaattaccagcacctcatcatggcactactctgtctgggttatacgttcctagtagagaggtctctcctccgctagtgaactctgaaggcagggactgggtctctctattcatggctatatccccaatgccaacaatacagtgggtacccaaacatgttagtcgaataattatagaggtatacaataggtacctactaaaagttagttggatgaacataagcatatacagaaagcattcaataaatgttgactggagatatagggatatacacccaataacgcacccagtaagtactgattgaataaatatgggtgtatatagtaagcactcaataaatggccaaatacaaccacaggagtatatactaggtaccaaataaatgttggttggataaaaatagacatatgtggtaggtgttcaatagatattggttgattaaatagagaactatacagtaggcattcatgtattgaataaatatagggatatacagttggtacccaatacatgcttgttggataaataatttttaaaaatttattttctggccaggcgcagtggctcatgcctgtaataccagcactctgggaggctgaggcgggcagatcacaaggtcaggagtttgagaccagcctggccaacatagtgaaaccctatctctactaaaaatacaaaaattagccaggcatagtggcacgtgcctgtagtcccagctactcaggaggctgaggcagaagaatcgcttgaacctgggaggtggaggttgcagtgagctgagatggcgccactgcactccagcctgggtgacagaacgagacttgtctcaaaaaaaaaaatttattttatatatttttttacctttcctatggtgttgatggttggataaatataggagtatatagtaggtgtccatatataaaagctattgaggccaggcgcggtggctcaagcctgtaatcccagcactttgggaggccgaggtgggcggatcacctgaggtcaggagttcgagaccagcctggccaacatggccaaaccccgtctctactaaaaaaaatacaaaattagccgggcgtggtggctggcgcctgtagtcccagctactcgggaggctgaggcaggagaatggcgtgaacccgggaggcggagcttgcagtgagccgagatagcgccactgcagtccagcctgggcgacaagagcgagactccatctcaaaaaaaaaaaaaaaaaaaaagctattgaataaacacaggggatagagtaggtgcccaataaatactggttagctaactataaaggtatatagtaggtgtccatatacagaagctatcttttttttttttgagacagagtctcgctctgttgcccaggctggaatgcagtggtgcgatcttggctcactgcaacctctgcctcctaggttcaagtgattctcctgtctcagccttcagagtagctgggattacaggtgcccactaccatgcctggttaatttttgtacttttagtagagatggggtttcaccatgttggtcaggctggtctcaaactcctgacctcaggtgatccacccgcctcagcctcccaaagtgctgggattataggtgtgagccaccacgcccagccagaagctacttttttttttttgagacagagttttgctctgctgcccaggctggagtgcagtgacggtgatttcggctcactgcagccttcacctcccgggttctggcgattctcatgcctcagcctcctgagtagctaggattacaagcacctgccaccatgcctggctaacttttgtatttttagtagagatggggtttcaccatgttggctggtcttgaactcctggcctcaagcgatctgcccacctcagcctcccaaagtgctgggattacgggcatgagccaccatgcccggcctagaagctattaaataagcatagggtatacaataggcacccaataaatgctggttggataaatataggggtatatagtaggtgtccacatatagaagctattgaataaacataggatatacagtaggtgcccaataaacactgatcggattaatacaggtgtatatagtagatgtccatctatagaagctattgaataaacatgaagtatacaataggcacccagtaaatgctggttggctgatatctgggaaggggcacccacctcgtcaggtgccgggtagagggtgagcagggccgggggccggtgctgccgtcgaagggtttcattgcgccggtccacatcttctggggccgcccgctctagcagagagggcagcaatgagtcagctgccaggttcctcaggtcgaagatgctagaggcaccactgcttcgaggggtgtcttccggggagcccgagccacgccgggagtcattctgccagtggagaatgtgcaagcactgagtgccagctgtatacaccttcacctcactctggtgagagtgtcctcatactcattctagagatggggaaattgagggtcagggggtgagggtcatcactctaagggtcacctgggggttttgcctaccctctttccagaaacttctgtctggagagcctcccaacttttaccattgctgggggaggctactccttatcccacatttggggctttaggtgatccttatctggtcaatcaaaacacatctacccaccctagggactggctccaagggcctgggctgggccaatgaaagccttccctgggactttgttcactgtcgccagggaaggagagagttcttcctgaccttcctgcactggatcaaatcccagctcagctctgtgacactgggtctctgacccccaactctaagggcctcagtttccctatgtacatctaaaaataataacaaaattagccggcatggtggcgcatgtctgtaatcccagctacccgggaggctgaggtgggaggatcgcttgaatccgggaggtggaggttgcagtgagctgagattgcaccactgtacttcagcctgggcgacagagtgagattccatctcaaaataattaattaattaaaataataataataatgaaaacaacaataatctttggaataattatggttggtatacagtaggtgctcagtaaatgttgattgacaaaatacaggctcacggcctctaagaaccttgctgtgcctcagtttccttacctgggtgtaatggctgccctgactcctaggatgaaagcagaggacacatatgaagccttcagtacaccctaagcactcaataaatgtttataattatgacccctaactttttactcatggggactgatgcaattccttttgagctcaaggctgtttgggtcatttcctgtcacatgtgaccaaaagctgaggccggagcctccacacataccccttcagtgaccccagccaggggcttcctcaccgagtcctcagggccggacctctcgtctccagaagcatcctgctcaaagacctggcgggggaggcccttctgtcgctcccgctgtgtgtctgtggtgacggggctgtatgctgcactcaggtactgatacctagcaggaaacggggctgggcaggtagggagggctgagggcccccagggggtccccagtgtgttctgacacacctacatggcaccttcaaagccaccgtccttgtgctccaccagacaagtttgcctgctcttgcagggacaatgggcagatacacagtaggaccggctgcagacatcagctcagcccttttgggttccgaaccccctgagctgcccctaagtcagactcaccttctgtggacaatgacccagtcctcaatatacatctccaccgcggccctcacctgggcatccagttttctgcagcaaaagaagatcagggtaaacagagacaaggcctctgtgaatccttctgctagcctgtaaggttagcactgtcctgcctattccagacaaggggagatggaggctcagagaaaaagcatggcttgtccaacgtcacggccaagccaggagctgaagtcgggctgttgatggggttggcagagacagagtggaatcacaggcagagagggcgtggggctgaacccactcatccttggggatcccgggctccgtggtccggcattcccggggctgcagcagcagctccaagtcatcagctgggaattctaccaggtccctgaggggcccgggctcagcatctggtggccggctcagaagtacatcctcaaagtccaggggctcgacaacttcagtcagtgggacctggattggagcaaagtggctgtgatcgcactacctaggaggctgagagtgggggcacgaggcaggggtgggtgcgcgctggcttcaaactcaaataggagggcggtgggagccatggagggtgttggagttacggaggaaccatggaggatgatgacctcagactctccacccccacctcagctttccctgccctgcccctccctccaggggctccaggaaggaaatcacaccccatgcctggaagggcagaaactaacagtggaaggaaagaaatgttgacagaggccaggcaagagacaattcctaaagcctccgcaaccctgtgggcaacatggccccacccctctcaggcgaaagtcactcccctccccaacttctccctcctccatccccatctaggtggtccaggtggctggagatgggggacatcaggagggagccactcccctgaccacccacagggtgacaagcagcggcagggagagtggccacaggaattggtgagactactaggaccaggacaggcactccctcccccgacactgctgggtccctctcggtttccccccaggacaggccacaggagggagggggtgggatagaacctaggccaaggaagcccctacctctgtctgagagagggcagagggctgggggcggaccccccaaatacttacccccagggagctgctgcagcgcctgctggagtggggggagccactgcgttcccgggacacctgcttccgcacctctgcggccaccgtcctggaaagatagggagggggccattggggacgggaaaactcaggcagcggagcggacagattctttctatgaggaaaatccagattgtggaacgaaataaataggccgagggccaagagaaccaggagtgctgaggctttaagggcccacagctccccagttcccccaacgcgttccccatcaagcacagatcaggagatgagaatgctgccaccagtggggtctgaagccatcacggactctccttcccctcccggctgggcctgtggccttccaggtctggagggaggcccacgggtccctggcctctgctccctcatctgggggacctctgtccatcctgctgttccccaacacacccagccctgcccctggaccccatccagaacatacatcccttcccatccttgctttggggctttggataagtcatttccacctctgagcctcagtttacccttctgtagctgatgccctgacttcacagagctgctgggcagagcggagcctggggcctggcctgaagtcacagagatcctgagatgaggccattgtgtcagaggtcaacctggcctgcggggcccagagctgggaggccttctaagtaaccccaagcaaccaaggtgggccctggggccttcctgggccacctggatctgagcaggccttcaaaatcagggaggatggccaggcatggtggctcacacctataatcccagcactttgagaggctgaggcaggcggatcacctgaggtcagaagttcaagaaggtcctggccaacaaggggaaaccctgcctctactaaaagtacaaaaattagccagactcctgtagtcccagctactcaagaggctgaggcaggagaatcgcttgaacccgggaggcgcaggttgcaatgagtcgagatcgcgccactgcaccccaacctgggcaacagagcaagactttgtctcgaaaaaaaaaaaaaatcagggaggatgggggtaaaggggcaagactcgcagtagaggggactctgcaggaatgtggagcagagccagtggggacagggatggctcagccctccaattcctctggctgagctcagaagtggatgagagagccatgcagttacctgagggtagagggtgcccagcagggggcacagcaggtgcaaaggacctgagttcgggctccgtgctttgagtgtggagactcctgctccctggggtctctgtgaaggcaggagctagggctgtgtgtcccccaaagagggccttgcacatactaggcacacactccttttttttctgagatggagtttcgctcttgttgcccaggctggagtgcaatggccacaatcccggctcactgcaacacctgcttcccgggttcaagcgattctcctgcctccgcctcctgagtagctgggattactggcatgtgccaccacacctggctaatttttcgtatttttagcagagacggggtttcacaatgttggccaggctggtctcaaactcctgaccttaggtgacacacctgcctcagcctcccaaagtgctgggattacaggcatgagccaccgctcccggcctactttttttttttttttttgagacagggttgctctgttgcccaggctggagtgtagtggcacgatatcggctcactgcaaccttcgcctcccaggctcaagcgatcctcctcccacctcagcctcagcctcccaagtagctgtgattacaggtgtgcaccaccatgcctggttaatctttctattttcagtagagacagggtcttgccatgttgcccaggctggtctcgaactcctgagctcaagcgatctgcccgccttgtacttttttttgacagaatgagtgagtcccttccagtcttcttctacaacttgcccaaatctgctgagtgaggggaagccccaggtcttctggctgtgtggctttgggcaggtaggataccctctctgggccttagtccctcttaaaatagacaagctgattgcctgggttttcagggcttactcccttctgcttcccaattccctgtgtaattgtaaatttttttctttttctttttgagacggagtctcgatctgttgcccacgctggagtgcagtggcgcaatctcggctcactgcaagctccgcctcccgggttcacgccattctcctgcctcagcctcctgagtagctgggactacaggcgcccaccactacgcccagctaattttttgtatttttagtagagacagggtttcaccgtgttagccaggctggtctcgaactcctgacctcaggtgatccgcccgtctcggcctcccaaagtgctgggattacaggtgtgagccaccttgcccggccccatttttgctcttaacagtcttggagtcttgcttctactgactgggggggttgagaaaagcgcttgtggggaattcaaaggatgtgaaaaattagggcttttgtcttcaaattcctaaagtcgggctgctgcctccagaaccgtgggcacacaggggctgggggataatttacaaaagatgctgggacaggggacaaagctgtgccctggtcccagctgttctgcagctgctgctccagaggagggagaggggaggagggacggctgggcctccagcttccttttccccttggccttggagagaggcccctgcagtgggaaaacgccgggtctgcaacaccacagccacagagccagctgactgcatcacaggactctgcacggagagccgtcaagcttggatgagtgaccatcagtctctcagcctcagggctcaggccactgaccaccttcttgagctgttctgagtgtaaggctttgcacacagtaagtgctcaattagggcttgctgccaccatgttgtcttcaaagacaatcctaggcagctgggatttctgaccctggttttttgttttcgttttttaaaaaaattttatttatttttttgagacagagtttagctcttgttgcccaggctagagcgcagtggcatgatctcagctcactgcaacctccacctccagggttcaagcgattctcctgtctcagcctcctaagtagctgggattacaggcacccaccaccatgcccggctaattttttgtatttttagtagagatggggtttcatcatcttggccaggatggtctcgaactcctgacctctggtgatgcacccacctcagcctcccaaagtcctgggattacaggcgtgagccaccgagcccggcctgtttttgtttttttgtgtctgtttttttgagacaggtcttactgtcgcccaggctggaatgcagtggtgcaatcacggcttactgcagcctcaacctcctgggttcaaggaatcctcctgcctcagcctcctgagtagctgggacaactgatgcacaccaccatgcttggctaattattattattattattattatttgtagaaatggggtctcactatgttgcctagtatggtctcaaactcctgaccttccgtgatcttcccgcctcagcctcctaaagtgctgggattacaggtgtgagccactgtgcctggcctctgaccctgtttttacaccaaggtgagatgtagatggcaaccatgagtgtcaggcatggtggcttgcacctgtaatcccagtgctttgggaggccaaggcgggaggatcgcttgagcccaggagtttgaggctgcagtgatggcaccagtgcactccagcctgggctacagagacactgtctcttaaaaaaaaaaaaaaaaaaaaaaaaagctgggcactgtggcttatgcctgtaatcccagcacttcgggaggccgaggcgggcagatcatctgaggtcaggtgtttgacaccagcctggccaacatggtgaaaccccatctctactaaaaatacaaaaattagccaggcatggtggcacatgccggtaatctcagttactcgggaggctgaggcaagagaatcacttgaacccgggaggtggaggttgcagtgagccgagattgcgccactgtactccagcctaggcaacagaaagaaacgctgtctcaagaaaaaaaaaaaatccatctataagccaggtgttgtggctcatgcctatactcccagcattttgggaggctgaggtgggaggatcacatgaggccaggagttcaagaccagcttgggcaacatagcgagaccccatttctaataaacacaaatgtacacacacacacgcacacagaaaaaaccatctgtgattattaagcaaggttgaaaatatgccaatccagcaattctactccaaggtgtggattactcagaaggaaacacatggccaagaatgttgacacctctgatcatgacagctccaaagtgaaactcacatgttcactgaccaaagagggaaataaatgcatgaggcaggggaatactacccagcaatgaaaaaggattgcaggcaatggcccagctgagccttcctgacatgatgctgagtgaacaaagttgggcacatggatgcaacacctcatgattcagtttatatgacaatctaaaacaggccagatcaggtaggggtgctggcatgcgggagggagccaggaaggtggagatagtccccatgggaaattgaccaagtggccatttcctcatttccttgccctttgctttcaaattattctttaaacttcgcacttttctttctctctctctctcttttttttttttccttgagatggagtctctgtcgtccaggctggagtgcagtggtgaaatctcagctcactgcaacctccacggcccgggttcaagcgattctcctgcctcagcctcctgagtagctgggattacaggcacccaccaccatgcccagctaatttttgtatttttagtagagatggggtttcaccatgttggccaagctggcctcgaactcctgacctcaggtgatccgcccacctcagcctcccaaagtgctgggattacaagcatgagccaacgcgcccggcctataactattctttaaacttttctttctctctcttttttttttcttgagacggagtctctgtcacccaggctggagtgcagtggcgtgatctcagctcactgcaacctccacgtcccgggttcaagtgattctcctgcctcagcttccccagtaattgggattacaggcactcgccaccatgcctggctaatttttatatttttcgtagagatggggtttcaccatctacagacccgaactcctgacctcaggtgatccacctgcctcagcctcccaaagtgctcggattataggcatgagccaccatacccaggctactttctttttctttcttttgagacagggtctcactctgtcactcaggctggagtgcagtggcgcaatcacggctcactgcagcctcaacctcctgggctccagcaatcctctcatctcagcctccccaggagctgggactacaggtatgagccaccatcacacctgggtaattttgtttcttgcagagacagggtctcgctatgttgcccaggctggtcttgaactcctggcctcccaaagtggtaggattacaggtgtgagccatcatacctggcccaaaatttgtagtttttggtatgaatgttgtatgttacagttgtttaaatggtaaaaaataacaatatatgtatgtgcttgtgtttgccaatatattcaaggatgggggagagagagagagagagagagatgtttacctgaaatttcagtggtaactttgggattttgaaatttgtcaataaatacctcattttcttcccacccctccaatgaatcattatttcttttctttttttttttttttttttgagatggagtctcgctctgtcgctcaggctggagtgcagtggcgggatctcggctcactgcaacctctacctcccaggttcaagcaattctcctgcctaagcctcccgagtagctgggattacaggcgtgcgtcaccacgcttttgtaaatttgtaaagttacaaaaagctaactttttgtatttttagtagagacggagtttcaccatgttggccaggctggtctcgaactcctgacctcaggtgatccacctgcctcggcctcccaaagtctgggattacagacctgggccgccgcgcccggccttttttttttttttttttttgagacagagtcttactctgtcacccaggctggagtgcagtggcacgatctctgctcactgcaacctccacctcctgggttcaagtgatcctcctgcctcagcctctggagtagctggaagattgtctaatattcgggttaatctggtatttgtggaataaatgactgaatggatgaacagatgaatataggaccagctctgagtatgtagacacctgggtgcccaagagcgaagttgctctggaagccctgggccactccctcacagttcactagggccccaggatcattctctactcttaccctgagctctacagtatccaaaacccctctttctcacttgagtaaaaaccaggacccaaggacatacagaccaaaatgcaaagaaacagacagcaagctgggcgcaatggctcacgcctgtaatcccagcatttgggaggccgaggcaggaggatcacttgagcccaggagtttgaggccagcctgggcaagatagtgagatcccgtttctacaaaaggttaaaaagttagctgagtgttgcagcatacacctgtagtcccagctacttgggaggctgaggcaggaggatcacttgagcccgggagattgagactgcagtgagccaaggtatcaccactgcactccagtctgggtgacagagcaagaccctgtctcaaaaaaagaaaaggaaaaaaaaaaaaagcctgggtgcagtggctcacacctgtaatcccagcactttgggaggtgggcggatcacctgaggtcaggagttcgtgaccagcctggtcaacatggtgaaaccccctctctactaaaaatacaaaaattagctgggtgtggtagtgggcgcctgtaaccccagctactcaggaggctgaggcacaagaatcgcttgaacccaggaggcgaaggttgcagtgagccaagattgtgccattgcactccagtttgggtgacagagcgagactctgtctcaaaaaaaaaaaaagaaagaaagaaagaaaagaaaaagaaaaggaaagaaaaagaaacagacagcaataatgtttgcagcctcaaagacgccaaaggtctaagacattttgaaagccaatttacagacaaagataatgatagaacataaaaattgcccagccattacgccccagccaccaagtctcatccctcctctgctgagaactccccatggctcccacctcacctggggtccaaagtcaaagtcccttgcacagcccacacgaccctgtacattctactcttactgtccccctccagctctctgttcctgcctcagggcctttgcacaaacccttcccactctttccccccacaaactggcctcgatcgatccctctctcatctccttgaggtttttgctcaaaggcacctgctcatccaggccttcctgacccacctcccgcatctcaagcagcccccaccctcccatcccccttccctgtcttcttgtccctacagcacttgtcactgacaggtaatctactcgatcaggcttctggtctctctccgccactatatcccaagagggggatcttttgtctccataagaccagggcccaacccacagggcagctctttcacctgggggcagtcaggacaggtcccccggggagaggatacctgagcttctgaacgcacccttgtcgcaaagaccccccgccaactgggggcgaggcttttcagccccagagagtctgatatacccctcccaggctgtgactctcacaatccccagtggccacggaaatggatcccccagcgcctggggcctgtcccctcccccgtctgcccaccagctggttctgtccccagcccccactccctccattcaatcacccatccatccccagcgcggtccagcccgtgacgggagagcctgaagcagaaggtgggggggcgtccacagctgtcccccttccccccccccgacagctgggcactggaccctggagggggaagggcacgggaaactcctcgaggggtttcaaacgccaccaaggagcccatctctgtccccaaatctcagagcctggagcctccctgccccaaaccaggcactgaggaaggaacagaaagtccggcccaccccgatctccgagagcgcggggacagtgaggggccgagaggcggacggggagcgcagggagttcagggggcgcccgtcatccgcatccccacgccacctcctccgggaagccctccggacacacccccgcgcgtcacggaggcagaacggcagccgccatcgcgctcccagccccgacgcgactcccatctgggacccccgccgggacccccgcggccctccccgccttctcccgctcccagccccggccggaggaagctggcgggacccgggccgaggcggaaaggggttgaattgggggcgcccgggcggggagggtcgcaccgccccggggcggagccgggccacgtgggggaggtgggagggggccccgcggccacactacctgttgatcttgtgcgcgaaggcgcggcgctcggaggcagccatggtcctcgcgtcccgccgccgccgccccgggccccggccccgccgccgccgccgcctcccggttctgggcagccggggcggggcggggccggcgcgggggcggggcccttccgggtggcccgggccgctccgtgctgcccctgcaggccggaggggtcgcctggagtcctgggggctggggaaactgaggctggggacggagaggaggccccgggatccaggctgggcgggccccagactcccgggctggggggacgctctttctaccctaggagaagggctggggaaactgaggctgaggagggaagttagggagaggaggcgctgggacccagactgggggtgccccagactcccgagctggcgggggcgctctttccaccctgggagctgggctggagaaactgagcctgaggagggagggagggaagggaggcgctgagacccgggctaggtggaccccaggctcccggggtttagtggggtggtcttaccaccccaggagcagggctggggaaactgaagctcaggagggagggagggaggggaggcgctgggacccaggctgggtaggccccagatttccggggtttggggggcgctctttctgccctctgactcctggctggaaaacaataacgatgttcatgtatctaataatcatacctgtaagtataatcgtggccgtgcatggtggctcatgcctgtaatcccagcactgtggggggccaaggcaggaggattgtttgagcccaggagttggagaccagcctgggcaacataatgagaccccgtgtccacaaaaaatgcaaaaattaaccaggcatggtggtgtgtgcctgtaatctcagctacttgggagtctgagggaggaggatcgcttgagcctgggaggtcaaggctgcagtgagctgtgattgtgccatttcaatccagcctgggtgacagagcgagaccctgtctcaaaaagtctaattgctaagatgtcattgagcctggccctgcaattcacacatgcagaagaaattattgttttcctccttttacagatgagtaaactgaggcacagaggtgttcgggtgcttgctcagtgtgactcacaggggtctccagcgcctgcattgtccgtgctcccagtctacagcatgggagtcagaggagcctggctaggcactggagtgctcggagatgtgccccaggtccaggtggtgggacctgagtgagccagtttgggagtctagactttcggggccgcctctaccaagaggaagaggtggggatgtcttggttaatctatggtctcaaatctctccccactggcctctctcccagcactgctgcagcatttttagagaattctccagccgacactcccctctggaggagctcacccctttctcacctgcatgcctctgcaccggcaggtccttcctcctggacagcccttctttccctggtcagcaaatgccccagggagaatttgaggttgaatcagacaaggccgtggctctgcctcagggcctttgcacgtgctgttctcattcccatctatgggttgctggcattttatcctctattatttatttatttatttatttatttatttatttatttatttatttattttgaggtggcatttcgctcttgttgcccagactggagtgcaatggcacaatctcggctcaccgcaacctctgcctcccaggttcaagcgattctcctgcctcagcctcccgagtagctgggattacaggcacccaccatcacacctggctaattttttgtatttttagtagagacggggtttcaccatgttggccaggctggtctggagctcctgacctcaggtgatccacccgcctcggcctcccaaagtgccgggattacaggaatgagccacatgcccaccctgagtcaccatgcacccccgagacacagtttcttgccttgctgcccaatgaatccatgtcagaccttgaacccacaggaaagaggcctggattgtaggggaacccccaaaccctgccagtcagacgcaggatagcatcctgctagtcaggccgcagtagggctgctcacagcctggcatgtgacatgtgcacacagcccacgtgcctgcccggagtggtccagccactttggccaggtggagctccgcccatcactccccgccatgccccaccaagtgtccccgccttgcctctcaggctgctgggagctaggctgggcaggaaatatgcagatgagcgaagatttgcacatttcttagcctagttccagtccagccccctttatatccggtctcccagcttcctttctcatcctccccccagcttgttcctgcatcagtggccaggaagagcctgggaacacctgcatcacttcagttccctcctctgttcagaaccttccatggctcccacctcactcagggtaaaagccaaagtcctcccacaacccgccgggcacagtggctccctgtcatcctggcactttgggaggccgaggcgggtggatcacttgaggtcaggagctccagaccagcctggccaacatggcaaaaccccgtctctactaaaaatacaaaaaatagccgggcatggtggtgggagcctgaatcccagctactcgggaggctgaggcatgaggatcgtctgaacccaggaggtggaggttgtagtgagctgagattgcgccactgcactctagcctgggcgagagtgagaccctgtctcaaaacaacaacaacaacaaaacaaccaacaaacaaaaccaaagtcctcccacaacccacaaggcccagcatgatcaaccctgtcacctccctggcttgcctcttccttttctttccctcattcactccactccagctgcccctgcctcctggatgcttctctaaacaccaggacacagctccactcaaggacctttgcatgttctgttccctttcccacatatgggcgttgccagtagcccccttttacagataaggaaactgaagaacacccagagaggggactcgccctaatgtagcctagtgaatcagtgtcagatccaagatttgactccagggagcctgatcccaaagcggttgtctctaaagtctcactgggtctccatcagacctggctgtgtgacccaggataaattgctcaacttctctgagccccagtttccttgtttgctccctgagagttcgtggttggtcacagcttgagacccagacatcaggaggtaggttgagccatggagcagcaaacttcagggccttgtcagggcccattccctgtcgaagcccaagggggttttgagctcagcgactccatgtcctgccttggtggaaacgctgcttcagagattgctccaatcaaaggccctaccccagatgcctcgagcacagtacccgccccagtgcctgccagacctgactggtgaggctatttctctccagagcaccaccagccctgactcagctgggtgtggctggggtgcccctgacagctgatcaaacagaggctgagcgtggtggcggggactttggcctcctctgctctactgcgtggagaacacgttgcggacatgaggctggagctggtggaccagggaggaggggctgtactggtccaggttagggatgataggcctggatggggtgaggatacaggggaggtgagaagtcggtgggctctgagcagatggctcactggtggctggacagtgagtccatctgcaagttagagtaagagaggagtcaaaaaccgtctccttcacccacgctgctgcctaatgctgctccctccacgtggaatgctgttccatccactcctcgtctgcctgcacccttctttgtcccttatatctcagcttggacatccctgcctttgcccgctgcctccgccatggaggccccagtcacgccccagttgctgggttacctttctctgtggggttcccagcacctgacatttagtaggagctccataaatactgactttttggttttgctctttttttttttttttttttttgagacagggtctcactctgttgtccaggctggagtgcagtggctccaatatggctcactgcagcctcctcctcccaggctcaagcaaccttcatacctcagtccccaactctgggactacaggcatgcaccactatggccagctaatttttctgattttttttgtagagacaggggtctcactatgttgcctaggctggtctcaaactcttggcctcaagagatgctgccaacttggcctcccacagtgctgggattacagacgtgccctcttttgttttcctgatctgctgctcagagcttgtccccgacctcgctgttggaatcactgtagcatcataatatgcttctgtatctttctgtgctgggtgcagctgcctccagacctttgcacaggccatcccctctgcccagaacatggttcccggactccttaccttaacagactttttttttttggagacagagttttgctcctgttgcccaggctggagtgcaatggcatgatctcggctcactgcaacctccgcctcccaggttcaagcaattctcctgcctcagcctcccaagtagctgggattacaggcatgcgacaccacgctcgactaattttgcatttttagtagagatggggtttctccatgttggtcaggctggtcttgaactcctgacctcagctgatccgcccgcctcggcctcccaaagtgctgggattacaggtgtgagccactgcgccctgccacctaaacaaacttctattcattcttcaggtctgatgcctcttgcaagccttccgtgaccacctctctcccctgtggaagctgggtcaagggctcctctgggctcccgtcccctccagcccctgggtctccccatcgcagtcctgatcaccctcagaataactgtctggttctgtggtgtctgctcctcccattccaatgtcagctccatgaggacagaaatttttctttttcttttttccttctttccatgacagggtcttgctctgtcgcccaggctggagtgtagtgatgcaatcatagctcactgcaatcttgatctcctgagctcaggcaatcctcctgcctcagcctcctgagtagctgtggtcccctcctgggaccacaggtgaatgccaccatgcccagctagtttttaaattgtttgtagagatggggtctcactacgttgcccaggcttttttttggagacagggtcttgctctgtcaaacaggctggagtgccatgacatgatcatagcttactgcaatctccaactcgtgtactcaagcgatcctcccacctcagcctcccaaagtgctgggattgcaggcgtgagccaccaccgttcctggcctctctgccttattcactgctgtatccccaacacccaggacgcagctgtgcatactataggtgctcagtaagagaatgagtgagccagagtagtacagggcctcactggccagaggacctcagtgcctctctgtcccctggtgtccgctattgataccatcagtgtggcaagagcaaccagtcccacagcagggagatagcttccttgtggagagggagtctgcctgggcctcccaaactgagaggtgtcgggggtgatggtgaagagggaggttgagtgaggctgcccactggcccctggtgcctgtggtgaaaatggtgggcccagccagcctaggacacttgccccatcctgcccataggcagaggaccctgctgctacgtggagaattgaggagcaagagcatgcaaggcacatccatgcaacaggcatccgcggagcatctaccatctgcaggcgccgactcaccccgggaggtggaatcatcatcccgggtcaccatcctacaggtgcaggaaactgaggctgagagaggagcagtcaccagcctcaaatcatacaacactggtgtgccaggcacggtggctcacgcctgtaatcccagcactttgggaggctgaggtggacggatcacttgaggtcaggagttcaaaaccaacctggccaacatgttgaaaccccttctctactaaaaatacaaaattagctgggtgtggtggtgtgcgcctatagtcccagctactcgggaggctgaggcaggagaatggcttgaatctgggaggcagaggctgcagtgagctgagattgcgccactgccctcacttcagcctgagcgacaaaccaagattccgtctcaaaaaaaaaaaaaaaaatcacataacactggagtcgtaggactcgaacccacgtctgtcaacttcagggaactctctcctgtggtttttcagatgcatttcggcaattggtgaattacttgagtgaatgaatgggtgtcttgcagtcagtggtgagctcagagtaggaacaggaatgagcaggatttggagtcccgagagacgtggattggagttctggcttggccacacagctggactgcgtgacctggacctctctgggcctcagtttcctcatctacaaagtgggcgcagcaacctcagtgctccactggcacggggccagtgaggtggcgtcaggagagcacaaaaccaagggagacactgacgtgttggattgttttttctgctgtttccggagccggggaaggaagccagaagccaacacagggtgtccaggcctgcctttgggagtttaagttacaaagacaaaagctgggcctagacaggtcagaggggcaggacacaggcttcctgtttttctttgaacagatggcccagccaccagatgcttgtctgtccggacatgtgtgcattgtccaaggaacttgcttctttttaaaatactttatttttagagatggtgtctcactatgttacccagcctggtctccgactcctggcctcacgcgattctcccacctcagcttcccaaagtgttgggattacaggcatgagccactacacctggctgaggccacttttgtgtaaaatatttggaaaaatgtatatatctgtatttccttggttttccagacattctcttcagacttccaagaaactggtgggactggaggacgagcaggagggatgctttgttttttaactgacagatttattgcttagagtcgtgtaaatgacagaagatacagcagacagaggagagtttccacccccgcccagagcagtttcccctattaacaacttgcatcctgctgaacatttgttataattgatgacccaatcttgatacatcattattcatatagtttacattccgatgcactgttcctgttgtacatcctactggtttttggcaagtgcatatgtttttttttttgagatggagtttcgctctgtcgcgcaggctggagtgcaatggcgcgatcttggctcactgcaacctctgcttcctgggttcaagagattctcctgcctcagcctcccgagtagctgggattacaagcacctgccaccacgcccagctaatttttttttgtttgttttgagacagaccctcgctttgtcacccaggctagagtgcaaatggcaggacctcggctcactacaacctctgcctcccaggttcaagacattctcctgcctcagcctccctagtagctgggactacaggtgcacaccaccacgcctggctaattttttgtatttttagtagagacacggtttcggccgggcgcggtggctcacgcctgtaatcccagcactttgggaggccaaggccggtggatcaagaggtcaggagatcgagaccgtcctggccaacatggtgaaaccccgtctctactaaaaatacaaaaaaattagctgggcgtggtggcgggcgcctgtagtcccagctactcgggaagctgaggcaggagaatggcgtgaacccaggaggcggagcttgcagtgagccgagattgcgccactgcactccagtctgggcgacagagcgagactccacctcaaaaaaaaaaagagacatggtttcaccatgttggccagactggtcttgaactcctgacctcaggtgatctgcccatctcagtctctcaaagtgctgggattacaggtgtgagccatcgcacccagccaaattttgtatttttagtagagacggggttttgccatattgaccaggctagtctcaaactcctgacctcaagtgatctgcccgccttggcctcccaaagtgctgagattacaggcatgagccaccgttcccagctatatatatatattttttgggacggagtcttgctctgtggcccaggctggagtacagaggcgcgatctcagctcactgcaacctctgcctcccgggttcacgcccttctcctgcctcagcctcccaggtagctgggacaacaggtgcccgccaccatgcccggcaaattttttttttgtatttttagtatagacggggtttcactgcgttagccaggaggatctcgatctcctgacctcgtgatccacccacctcagcctcccaaagtgctgggattacaggtgtgagccaccgcacccggcttttttttttttttttttttttttgagatggtgtcttgctctgtcacccaagctggagtgtggtggcgcgatctcggatcactgcaacctctatgtcccgggttcaagctgttctcctgcctcagcctcccgagtagctgggactagaggcatgtgccaccacgcccagctaatttgtatttttagcagagacggggttttgccatgttggccagactggtctcgaattcctgacctcaggtaatctgcctgcctctgcctcccaaagtgctggggttacaggcatgagccactgtgcctggccaaggtgcatatgtcttgtatctggtattatagtatcatacagtatcatattcacagtgcacagtatcatattcacagtgcacagtatcatattcgttgtgctaaaaatctgccaattcatctctcccttcccataggccctgggcaatcctgaccttttttttttttttttctttgatacagagtcttgctctgtcacccaggctggagtgcaatggcgcgatcttggctcactacaatcccgcttcctggttccagcgattctcctgcctcagcctccctagtagctgtgattacaggcacataccaccacgcctggctaatttttttgtatttttattagagatggggttttgccattttggtcaggctggtctcgaactcctgacctcagatgatctgcccaccttggcctcccaaagtgctgggattacaggcatgagccaccacgcctggcccactttttttttttttagacaaggtctcgctctgttgcccaggttggagcgcagagtggcacaatcataaactcactgcagcctccatctcctgggctcagatgatcctcccacctcagcctcccaagtagctgggactataggtgtgtgccaccacacccagctaatttttttttttttttgagacggagtatcgctctgtctcccaggttggagtgcagtggtgccatctctgctcactgcaagctctgcctcctgggttcacgccattctcctgcctcagcctcccgagtagctgggactacaggcgcccaccactatgcccggctaattttttgtatttttagtagagatggggtttcaccgtgttagccaggatggtctcaatttcctgaccttgtgatctgcctgcctcggcctcccaaagtgctgggattacaggtgtgagccaccacgcctggcttttttttttttttttctcttttttttgagatggagttttgctcttgttgcctgggctggagtgcagtggtgcgatctcggctcactgcaacatccgccttctgggttcaagcgattctcctgcctcagcctcccgattagctaggattacaggcgcctgccaccacacctggctaattttgtatttttagtagagacggggtttcaccatgttggccaggctggtctcaaactcctgacctcaagtgatccacctgccttgccctcccaaagtgctgggctttacaggcatgagccactcactacacctggccacacccagttaatttttaaaattggtagtagagataaggtcttgctatgttacccaggctggtctccaactcctgaggtcaagcaatcctctcaccttggtctcccaaagggctgagattacaggcatgagtcaccttgcccagcccctttcccccttaataacctccacccaggttgcgtgtggcggctcatgcctgtaatcccagcactttgggaggccgaggcggatgcatcacctgaggtagcgagtttgagaccagcctgaccaacgtggagaaaccccgtctctactaaaaatacaaaaattagctgggcgtggtggtgtatgcatgtagtcacagctacacaggaagctaaggcaggagaatcgcttgaactcaggaggcggaggttgcagtgagctgagatcgcgccactgcactccagcctggtgacagagggagactctgtctctcaaacaaaccaaaacaaaaaaccaaaacacaacaggtagctgggtgtggtggcacatgcctgtagtcccagctactcgggaggctgaggtaggaggatggcctgagcccaggaggcagaggttgcagtgagctgagattgtaccactgcactccagcctgggcaacagagcaagactccatctcaaaaaaataaataaataagaagaaggaaatagtcttggtgcaaagtctagctctgtgttcaaatcttaattttgtcacttgccagctgggaagcccaagtcctgtggggtccaagattttttatctggtgaatgggccttgcaggccccatctcacagagacaaggtgtcctaacaattgagtgaaataaggccagtaaaggggccaccaaaagatggaggttattttatttatttatttatttttttgagacagagtttcaccatgttggccaggatgatctcgatctcttgaccatgtgatctgcccgcctcagcctcctgaagtgctgagattacaggtgtgagtcactgtgcctggcctgtatttccttcttagcacaacctttcagagcaggtggcaatgactttgataaagctctgtcttttagatggaccacattttccttccttccttccttccttctttccttctgtccttcttttctttctttcttccttccttccttccttccctccctccctccctctctctctttctttctttctttctctttctttctttctctctttcttttcttgacagagtcttgccccatcagccaggctggagtgcaatggcatgatcttggctcactgcaacctccatctcctgggctcaagcaattctcctgcctcagcctcccaggtagctgggattacaggcatgtgccaccactcccggttaatttttgtatttttagtagtgacggggtttcaccatgttggccaggctggtctccaactcctgacttcaggtaatctgcccgcctcggcctcccaaagtgctgggattacaggtgcaagccactgcgcccagcctatggaccacattttcttagcccagtagctctgcaaagaaaaggaggtgacatcacgcagtagttagacacccagacacttgagttcaaatcctgcacctcagctcacaacaccagctttaatagacggttgctcacacctgttagaatggctacaatgaaaaataccaacaccaccaagtgctgaggaggattcagggaaactggaccctcatacgctgctggtggggatgcaaaatggtgcagctgctttggaaaatggtggttcttaaaatgcttaccatgcaagccctgtatgacccagcaaacccactcttgggtagtgacctaagagaaatgaaaatggatattgacataaaaacctgtatacggtcaggagtggtggctcacacctgtaatcccaacactttgggaggctgcagtgggtggatctcttgagaccaggagttcgagaccagcctggccaacatggtgaaaccctgtctctactaacaatagaaaaattagctgggcatggtggtgggtgcctgtagtcctagctactcaggaggctgaggcacaagaatagcttgaacccgagaggcggaggttgtagtgagctgagatggtgccactgcactccagcctgggtgacagagcaagactctgtctcaacaaacaagcaaaaaaacctgtacatgagctgggcatgggtacttgggagaccaaagtgtgaggatcacttgaggctgagagttcaaggttacactgagctatgattgcaccactgcactccaacctggggaacatagcaagaccttatctctaaaaaataaactaataatttaaaagcctcagtgtagtgcttcatgcctgtaatcctagcactttgggaggctaagggaggaggatcacttgagcctggagttcaaggctgcagtgagctatgatcacgtcaactgccctccagcctgggtgacagagcgagatcctgtgtctcaaaaaataaaaagtaaaatagaagaaaaggctgtgcatgaatgttgatagcagctttattcatcatcacccatggcttaaaacaatggagttgtccctcagtgggtgaatgtaaaacaaaccagggtctttccctacaatggaatattcttcagcaacaaaaatgagcaaactattgagacaggcaagtacttggatgaatctcaaatgcattatgctgcctgaaagaggccagactgaaaaggccacatagtgtatgattccagttatataacattctcaaaaagacaaaagtacagtgtgagatagcagacagatgagggcctgcctagggctcgggggaggggctgatgacagaggggcagcgccagggagcttcagggggatgcagcagctctgtctgatggccctggtggctcaatgaatctggacatgtgttaaaattcatagaactgtccacctctccgggaggaaattttactgtatttatacctagagagagagacatttgcagggggaatgggtccgtgagattctaggaatgtggttatttatccttgtaaatcccagtcacccctgctgagacaataggggtgacccattgtgcaacctgcagccagccagcccactttgcaaagttttctttctctttctttctttcttttttttttttttttttttttgagacggagtctcactctgtagcccaggctggagtgcagtggcatgattttggctagccgtaacctctgtctcttaggttcaagcgattctcctgcctcagcctccctagtagctgggattacaggcgtgcaccaccactcccggctaatttttgtatttttagtagacacggggttttacattgttggccaggctggtctcgaactcctgacctcaagagatctgcccgcctcagcctcccaagtagctgggactacagacgcataccaccatgaccagctaatttatttttatttttgtagagatggtgtcttgctatgttgcccaggctggtctcgaattcctaggctcaagcaatcctcttgcctcaacctcccaagtatctgggaccacaggagtgccaccacatctggctaattttattatttttaatttttaatttttaatttttattttattttattttttagtatttattgatcattcttgggtgtttctcggagagggggatttggcaaggtcataggacaatagtggagggaaggtcagcagataaacatgtgaacaagggtctctggttttcctaggcagaggtccctgcggccttccgcagtgtttgtgtccctgggtacttgagattagggagtggtgatgactcttaacgagcatgctgccttcaagcatctgtttaacaaagcacatcttgcaccgcccttaatccatttaaccctgagttgacacagcacatgtttcagagagcaagagattgggggtaaggttatagattaacagcatcccaaggcagaagaatttttcttagtacagaacaaaatggagtctcccatgtctacttctttctacacagacacagcaacaatctgatttctctttcctttccccacacttccccgccttccactcgacaaaaccgccatcgtcatcatggcctgttctcaatgagctgctgggtacaccacccagacggggtggcggccgggcagaggcgccccccacctgccggacggggcggctggccaggcgggggctgccccccaccttctggagggggcggctgccgggcggaggggctcctcacttctcagacggggcggctgggcagagacgctcctcacctcccagacggggtggtggtcgggcagagacactcctccgttcccagacggggtcgcggccaggcagaggcgctcctcacatcccagacggggcggcggggcagaggcactccccacatctcagactatgggcggcggggcagagatgctcctcacttcctagacgggatggcggccgagaagaggcgctcctcacctcccagactgggcggccgggcagaggggctcctcacatcccagacgatgggcggccaggcagagacgctcctcgcttcccagactgggtggcggccgggcagaggccgcaatcttggcactttgggaggccagggcaggcggctgggaggtggaggttgtagcgagccagagatcacgccactgcactccagcctgggcagcattgagcactgagtgagactccgtctgcaatcccggcacctcgggaggccgaggctagcaagatcactcgcggttaggagctggagaccagcccggccaacacggcgaaaccccgtctccaccaaaaaaaatacaaaaaccagtcagtcgtggcggcgcgcgcctgcaatcccaggcacttggcaggctgaggcaggagaatcaggcagggaggttgcagtgagccgagatggcggcattacagtccagcctccgctcggcatcagagggagaccatggagagagagggagagggagaaggagaccgtggggagagggagagggagagggagagctctttttaattttttttgtagaggccagagtcttgctatgttgcccaggctggtttcaaactcctggcctcaagtgatcctcctgcctcagcctcctacagtgctgggattacaggtgtgagccactgcacccagctggctatgtggtttcttgtgcatcactctatccctagtgcgctgcacacagcctggcacacagtaggtgctcagtaagtgctttctgagtgaatgattgggagaagcagaaagtattccaagggaggcatgggcaattgtttttttgtgtttttttgagatggagttttgctcttgttgcccagggtggagtgcaatggcacgatctctgctcactgcaacctccgcctcctgggttcaagcaattctcctgggttcaagcgattctcctgcattcaagtgattctcctgcctcagcctcctgagtagctggaattacaggcatgcgccaccacacttggataattttgtattttagtagagacggggtttctccctgttggtcaggctggtctcaaactcccgacctcaggtgatccacatgcctcggcctcctaaagtgctgggattacaggcgtgagcctccgtgcccagccaggcaattttgttaatcgctgaatcttccagtttccacatgcctcctcctctctccaacccttctcgccctaacttttccagattgtgcatgaaatttctagattgtgcatgaatgccctgcccagccctgcacattcagaattcatttgaattgaacctgagaggtggaggttgtaccgagctgagatggtgctactgcactccagcctgggcgacagaccgagactctgtctcaaaaacaaacaaacaagcaaaaaccacaaaaaacctgtacatgagctgggcaaggctgagtgtggtggctcacacctgtgatcccagtgcctccagagggtgaggcgggaggaatggcttgaggtcaggagtttgagaccagcctgggcaacatagtgagaccctgtctataaaaaaaataaagaattagccaggtgtagtggcgcatatctgtggtccctgctacttgggaggctgacaagggaggttcgcttgagcccaggaatttgaggctgcagtgagctatgattgtgccactgccctccagcctgggtgacagagtaaaagacaatagcaacaaaaacgctgaatgaaatacagcaaacatgcttttaagttatcagctaagttcacaaaaaagtaagagaaatctccaaggaacacagaggaggggaagttagtgctgaggcgccacattccttgaccctgtgagataaaggctgcagtgagccgtgttcacactgctgcactacagcctgggcaacagaacaaggctctgtctcaaaaaaaaaaaaagaaaaagagaaaaagaaacctcgtctccaaaaaaaaaaaaaaaattaaaaatcagcctgtagtcccagctattcaggaggctgcggtgggaggatcgcctaatcccaggagctccatgttgcagtgagctgtgatcaggccactgtactccagcctgggtgatagaacaagactccatcccctcccctcaaaataaaaataaattgaaaaaataaagaacaaattaaaacaaggtcattaggatggaccctaatccaaatgaccactatccttataaaatgaggaggtatgggctgggtgcagtggctcgtgcctgtaatcccagcactttgggaagctgaggcaggtggatcatttgaagtcaagagttcaagaccagtctggccaacgtagtgaaaccctgtatctacccaaaatacaaaaattagctgggtgtggtggcgcatgcctgtaatcacagctatttgggaggctgaggcatgagaactgcttgaacctgggaggtggagattgcagtgagctgagattgtgccactgcagtccaacctgggggacagaggaagactctgtctcaaaaaaagaaaaaaaaaaagaaaagatgaggtgatatggacacagagacaagcattaaagaaagactatgtgaagacacagaaacaaggcaactggctctaagccaaggagagagacctcagaaagaatcaaccctgctgacaccttattcttggacatacaccctccggaactgtgaaatgccctgttttataagcttccctgtctgtggtgcttggtcatgacagccttagcaaactcatacacgtcccctcttcccaactgctgcttcctggcatcaccacctctcagacaaagtacttgtattaaatccttgtttcagtggtggcttccacggaacccaaactaagacaaggccaccccagggtacaaaaggtggcatggggaaagaagagagtctctggggagcattgtcatgcagagaaaggaaaggagaggtcttcaaggaagtagagccagacctcagtttcagaagccattgtatttgctcccagaacccatgagaaaaaacttctgctgtggtggtggtggtgaatcccacaataggaagcttctctgtggttttgagccacaaaagaaagttgtagcccattgtttcatggccacaaaggaaatggtttccagttgggtgatggttcgcttgggttgctgggaggatctgacctcaaccttcctgctgcaccctgggcaatggtgcatcttctcttccggcatcttctctctcctgtttttcaagtttactcttttttttttttttttttttttttttttgatacggagtctcactctgtcacccgggctggagtgctgtggcgcgatcctggctcactgcaagctccgcctcctggcttcaagcgattctcatgcctcagcctcccgagtagctgggattacaggcatgtgccaccatgctcagtggctaatttttgtatttttagtagagacggggtttcaccatgttggccaggctggtctcaaactcctgacctcaagtgatccatctacctcggcttcccaaagtgctggaattacaagcgtaagccaccacacctggcccaagtttactctttctaaaaagaatttatttggggtttgctctgttgcccaggttggatgcaacctggtggtatgatcatagctcactgtagccttgaaatcctggattcaagtgatcctcctgcctcagcctcctgagtagctgggactacaggtgtccatcacctgacccagtaattaaaatttttttttgtagagatggggtcttgctatgttgcccacactggtcttgaactcctggcctcaaacaatcctattgcctccaatacatctggcccaggtttactctttttttttttagacagtatgttgctcttgttgcccaggctggagtgcagtggcacaatctcggctcacagcaacctctgcctcctgggttcaagcgattctcgtgcctcacctcagcctcctgagtagctgggattacaggtgcgtgccaccacccccagctaatttttttgtatttttaatagagacaaggtttcaccatgttggccagactggactcaaactcctgacctgaagtgatccacccgcctcggcctcccaaagtgctggaattacaggcatgaggcactgccgctcagcccccaggtttactcttttttttttttttttctttttttgagacagagtttcactcttgttgcccaggctggagtgcaatggcatgatctcggctcactgcaacctctgcctcccggtttcaagcgattctcctgcctcagcctcccgagtagctgggattacaggcatgcaccactatgccctactaattttgttttttttttttttagtagagacgaggtttctccatcttggtcaggctggttgtaaactcccaacctcaggtaatccgcccaccttggcctcccaaagtgctgggattacaggcatgagctgccgcgcccagccaggtttactcttaatttaaggttgagcccctgggctgcacactcagccttgtggatggatgactggctttgggccaaggtttggcttgcagcttctcctcactctcagcctagaggcaaaaacttttctttctttttgttaaaaacagctttactgagatatagtctacacagtatagaattcacccctcgaaagtgtacaattcaatggtttttcctatattcagaattgtacaaccatcacccagcctattttggaacactgtctcatctcctcaaaaagcagctccacagcctttagctatcattcccctatcccctcgtccctgccgcctcacccctaagcaactacgaatctactagtctggactgtcacatgagtgcaatcatacaacatctgtcatttcgtgtctggcttatttcacatagcttaaagtttgtaagattcatctgcagcctgtgtgactgtatcattcctttaaattttgttttaatttttaaaattgagatggaatctcccatgttgtccaggcttgtcttgaactcttcggctcaaacgatcctcctacctcagtctcccaaagtgctgggattacaggcgtgagccaccgtgtctggacattcattcctttttttaatttttttgagacagagtcttgctctgtcacccaggctggagtgcagtggcgctatctcagcccactgcaacctctgtctcctgggttcaagcgattctcctgcctcagcctcctgagtagctgggactagaggtatgcgccaccacgcctggctaatttttgtggttttagtagagaaggagtttcaccatgttggccaggctggtcttgaacacctgacctcaggtgatccgccctcctttgcctcctaaagtgctgggattacaggcttgagccatcacgcctggccgacattcattccttttaaaggctggataatattccattgtatggatagaccacattttatttatccgttcatcagtggatggcccctatggactattgttagcggtgctcttacgccatttgagttacacatttttgcatggacatatgatttcatttctcttgggtacgtatatacctaggagtggaattgctcggtcatatggtaattccacttttaatctttttttttttgtcctgtagaggtggattctcgctggtcttgaactcctggactcatatgatcctcctgccttggcctcccaaagtgctgggattataagcataaaccactgtacccagccctttctgtaattttttttttttttgagacagtttcattctgtcgcccaggctggagtgcagtggcacgatcttgcctcactgcaacctctgcctcctgggttcaagcaattctcctgtctcagcctcctgaggagctgggattacaggtgctcaccaccacgcccggctaattttttgtatttttagtagggttttagtagggtttcaccatgttggccaggctggtctccaactcttgacctcaggtgatccacccactttggcctcccaaagtgctgggattacaggccgtgagccaccgcacccggccctatgtgtaacctcttgagaagctctcagactgttctccaaagctgttgccccagctgacattcccaccagtggtgtatgagggttctgatttctttgtgtccttgtgtgaaaatacttctttaaccaattttacagataagactaaaatatactgaggcccagcaacgagctcaagctcccacagctactgagacacagagctggggcaggtgcccaggtatccagactccagacatcaggatttgctcatttcattgaggctttaacaaagactctgtggatctttattgagctcctgttacataccaagcactgaagacacacagtgaacaaaccaatgtagaaaggactcagatagcttaaaataataataggccagtgcccagtagcatacacctgtaatcccagcactttgggaggtcaaggcgggatgatcacttaagcccaggagtttgagactagcctgggaaacatggtgaaaccccatctctacaaaaaatctaaaacttagctggtcatgggtcaggcactcccaaagtgcagtgctcccactgtactccagcctgagcgacagagcgagactccttctcaaaaaaaaaaaaaaaaaaaaggttagctggtcatgatgggggcacatgcctgtagtcccagctattcaggaggctgaggtgggcggactgcttgcgcctggggaggttgagacagtagtgagccaagatcacgccactgcattccagccccagtaacagactgagaccctgccttaataaaaaggaaaaaaaaagttaaaaatttaaaaaatatttgaattcaggatggcagggactacatctgtattttttggcatcacaattggcatacactaggtgctcaatggatgcttattgaatgaaaggttgaatgaattagtgaatgagcagatgtcacccatcagaaagaatcactgaccttggagtcaggagacccatcttcaaatctgggctcctctgttccaggcaatgagcctcatctgttttttgttttttgagacagagtcttgctctactgcccaggctggagtgcagtggtgcaatcttggctcactgcaacatccacctcccaaggtgaatcaattctcttgcctcagcctctcgagtagctgggattacaggcatgcaccactgtgcccaggtaatttttgtattttttgtagagacagggttttgccatgttgcccaggctggtctcaaactcctgacttcaggtgaactgcccacctcagcctcccaaagtgctgggatgacaggtgtgagccaccgcacccggccaagcctcatttgtaaagtggacatgacaatagcacctacctctaagcatgggagtgaagattctagatcattctagcacctggcatgaagtaaaggcttcaataaatgtatacaccaactctcccagatcttctgaaagagaagcacagaaaacagtctgaacacagcctggaaggagaattcctgtgctgggtgggttattttccatgaaccccgaggacctggctaagtttcaggtcagagctgtttttttttcccccaaaattctctcatttgctctggtccaagtggagatcctggttcccagtgtcccccctgcccccacccccttcccgccaggcgcagcagggagcgtccgctgagacagcaagaaaacccacccaagaatgcagaggcctcagctgaggacagcacttgtaattcagcttggtcaccctttaaaaacaattgtaaggccaggagtataatcaatgtactcgtgcctgtaattccagctctttaggaggctaagatgggtgaatggcttgagtccaggagtttgagaccagcctggccaacatggtgaaacaccgtctctatcaaaaataataagaataataggccgagcacggtgactcacacctgtcatcccagcactttgggaggctgaagcgggcggatcacctgaggtcaggagtttgagtccagcctggccaacatggtgaaaccccatctctactaaaaatacaaacaattaacggggcgtggtggcacatgcctgtaatcccagctacctgggaggctgaggcaggacaattgcttaaacttgggaggcggaggttgcagtgagctgagatcgcgccattgcactccagcctggacgacagagcaagactccctctcaaaaataaaataaaataataataataaaggcagatctttttttttcttcttggtctttttatcctattatagtaataataactgcatagtgcatgctgagataagaggcagtggtcgctccaatcactgcctcttctgatgtctcgtggcctcttcccttctgtgtctaaatgttcctctcctctctttctctctctctctcttttttttttttgagacagagtctcgctttgccgcccaggctggagtgcagtggcgcaatctcagctcactgccacctctgcctctcgggttcaagcaattctcctgcctcatcctcccgagtagctgggagtacaggcgtgcaccaccacatccggcatatttttgtattttagtagagacagggtttcaccatgttggtcaggctggtcttgaactccagatttcaagtgatccaccttccttggcctaccaaagtgctgggattacaggtatgagccaccatgcctggctggatttttcaagagacgcctcaaatccagacttctccattgaaaatattttgaatttttattttattattatttcttttagacagagtctcactctgttgtccaggctggagtgcagtggtaccatcatggctcactgcagccttgaccttctgggctcaagcggatcctcccgcttcggcctcccaaagtgctggaattacaggtgtgagccaccacagcttgccttgttttttttttttttttgaaactgggtctcactgtgtcacccaagctggagtgcagtggcacgatttcagctctttgcatcctctgcctcccaggttcaagcaattctcttgcctcaggctccagagtagctgggaccacaggcgtgcaccaccacacctggcttattttttgtatttttggtaaagacagggttttaccattttgcctaagctggtcccgaactcctgggctcaagtgatcctcccaccttggcctcccggagtgctgggattacaagtgtgagccaccgcgcctggcctcgtgccttgatttttttaaagtcaaagtcaccagcaagccatgaacattatctctcttcttaaggaagaaagggaccagggtggtggcctaggcaacatagggagaccccgtctctacaaataatatatatataaaaaaaaacaactagctgggtggggtggtgcatggctgtggtcccagctactagggaggctgagctgggaggatcccttgagcctaggagctggaggctggactgagctatgatggagccactgtactccagcctgggcaacagagtgagaccttgtcaaaaataaaaaataaaaaaataaaaaataaaaataaataaaaaaaggaaggaaggaaaggtctccttcaccggatgtgaacccttttcccaaatcttgtgctgtgtttctcagcccccacaggcagctgaaatatgtcatcacccacccactgcttcctgtctgtgttagatttttgggagctgccataacaaatcatcaccagcttgctggtttaaaacaacaagaatttattcttttattttttgagacacagtctccctctgtcgcccaggctggagagcagtggggcgatcttaggtcactgcaaccactgcctcccaggctcaagcgattcttctgcctcagccttctgagtagctgggattataggcatgtgacaccatgcccggctaatttttgtatttttagtagagacagggttttgccatgttggtcaggctggtctcaaactcccgacctcaggtgctccgcccgccttggcctcccaaagtgttggaattacaggcgtcagccaccacgcccagccccctaaaatttattctttcactgttctggatgccagaagtctgaaatcaaggtgtcaacagagccgtgctgcccccaaaagctctggggaaggttccttccttgcctcttccaacttctggtggcccctggtggtcgctggattgtggccacgtcactccaatcactgcctcttccatcatcttgtggccttctcccctctgtctgtgtccaaatgttcctctcctgtctctctttctctctctcatttttttatgagacagagtctcactctattacccaggctggagtgcaatggtgtaatctcagctcactgcaacctctgcctcctgggttcaagtgattctcctgcctcagcctccctagtagcctggagtacaggcgtccaccaccacaaccagctaatttttctatttttaatagagagagggttttgccatgttagccaggctgacctcaaactccttgcctcaaaatccacccacctcactctcccaaagcactgggtattacaggcatgagccaccacacctggcctcctttttttttttttttgagatagagtcttgctctgtcacccaggctggagtgcagtggcgcgatctcggctcactgcaagttctgcctcctgggttcacgccattctcctgcctcagcttcccgagtagctgggactacaggcgcccgccaccatgcctggctaattttttttgtatttttagtagagacggggtttcaccgtgttagccaggatggtctccatctcctaatcttgtgatccacccgccttggcctcccaaagtgctggaattacaggtgtgagccacagagcctggtctttttttttttttttttttttttaaccaacaaccttatttatttatttttgagacaaggtcttgctctgttgcccaggatggaatgcagtggcaccatcatacctcactgcagcctcgacttcccaggctcaagacatcctcccaactctgcctctagagtggctagtactacagatacacgccaccatacctggctaatttttatttttttagagacagggtctcgatatgttgcccgggctggtcttgaactcctggcctcaagcctcctgtctcctctggtcttgccctcccaaagtgctgggattacaggcatgagccaccacccctaacccctctcctatgtcttataaagacaccagatattgaccagatattggatttaggacctgacctaaatctaggctgacttcatctcaagatgtttaaccaatgacatctgcaaagaccctgttttcagatagggtctcatctgaggctccagatggatatgaattttgtggtgacatgacttaacccactgtggtgctcacggtaaccagagctggacatgaagttctacaggaactgcgagaacattagcaggtaccgggccgagtcatttccctctattcccaccaggaggccttgtagtcctgttccttttacaacatttatttcttttctactgtggcaaaatatatataacttaaaattttgtcattttaaccattttaagtgtacagttcaggccgggtgtggtggctcacacctgtaatcccagcactttaggaggctgaggtgggcggatcacttgaggtcgggagtttgagaccagcctgggcaacatggtgaaaccccgtctctactaaaattacaaaaattagccgggcatggtggcacgctcctgtagtcccaggtactcaggaggctgaggcaggagagttgctcgaacccagtagatggaggttgcagggagctgagatcgcaagatcacgccactgcactccagccttggcaacagagcaagactctgtctcaaaaaaaaaaagaaaagtacagttcagcagcattaagcacattcacatcgctgtgcagccatcaccaccatccgtctccagaactttctcatctttccaaactgaaactctatccccatgaaacactcactccccacgctcctctccattccctggtacccaccattctgttttctgtctttatgaatctgatgactctagggacctcaaatgagtggaatcatgcaatatttgtcttttttttttttcgagacagagttcgctctgtcgcccaggctggagtgcagtggcgtgatctcggctcactgcaaactccgcctcccgggttcacatgattctcctgcctcagcctcccaagtagccaggattacaggcgcctgccaccacatacagctaatttttgtatttttagtagagacggggtttcaccatgttggccaggctccaaactcctgacctcaagtgatctgccagccttggcctcccaaagtgctgggattataggcatgagccaccgcgcctggctcccgttgtcaattcttttagttaagaatttgagcaggtgtggtggctcatgcctgtaatcccaggattttgggaggctgaggcagccagatcacttgagtccaggagttcaagaccattgctagagcctgtctctaccaaaaatggaaaaaaaaaaaaaaaaggcaggtgcggtagtgtgtgcctgtagtctcagctactcaggaggctgaggcgggaggatcacttgagccctggagtttgaagctacaatgaactatgatcacatcactgcactccagcctgagcaacaaagtgagatccagtctgcaaaaaagcaacaaagatttctgcattcattttctcagcttttgagcatcttttcctctagttggacaatcttatacttaatcagctactaatactttcaaagggcatttaaggccgggcacgatggctcacggctgtaatcccagcactttgggaggccgaggcaggtggatcacctgaggtcaggagatcgagaccagtctggccaacatggtgaaaccctgtctctaccaaaaatacaaaaattagctgggcatagtggggcatgcctgtagtcccagctactggggaggccgaggcaggagaattgcttgaacccaggaaatgaaggttgcaatgagctgagattgcaccactgccctcggcctgggcaacagagtgagacttcgtctaaaaaaaaaacaaaaaaacaaaaacaaagggcacttaagttgttgtttccaatcattcacaagtcaagcgaggcttaagagcaggcattagcaaaactacattctgccacccatttttgtaaataacaaaaccatctcatattataaataacattttattttgacagagtcacacttgttcatttacatatatttacatattgtccatttacatattttctatggctgcaatagcagagtcccaacagagacggtatggtccgcaaagctgaaaatatttactttctggctctttccagaaaaatctgccagctcttggcctatgtgcatttgaataaatctgtagtaggaattcctagaaggagaaacattccccacaaggttttaaaagtccatttgcggttgttacaggtccgcctgtaataaaatctccaaaagctatttatgaggtcttttttttttttttttgagacagagtctcactgtgttgccgaggctggcgtgtgcagtggcaagacctcggctcaacgcaacctccgcctcccgggttcaagcgattctcctgcctcagcctcctgagtagctgagattacaggcatgcaccaccatgcccggctaatttttgcatttttggtagagacggggtttcaccatgttggccaggctggtgtcaaactcctgacctcaagtgatccgcctgccttggcctcccaaagtgctgagattacaagcgtgagccactgcacctggccaaccttttcaatgtgtttaagtgagatacttgaggaatatgggatgggaacagtcttggccaccctgggaccagctgcccagacaacagagggaattagaacccgatcccccatgctaacaagaacagaagccccctcgagatgtgtcacctgcatgcactggtctggggccactcgctgcttcctgaactctcatcaggaccctccagtcctcctaacccttcaaggttgatacccctgaaaccctcccttctcatcactgcctgggtataccttatatactaaatatttttaatattatcaaggatcttggctgggtgtggtggctcatacctgtaatcccagcgctttgagaggctaagtcaggaggattgcttgagcccaggagttcgagaccaatctgggaaacatagcgagacccctgtctccacaaaaaataaaaaaattagccgggcgtggtggcacgtgccattggtcccagctactctaaaggccaaagcgagaggatcgcttgagcccaggagggtgaggttgcagggagctgagatcacactactgtacttccagcctgggagacaaagcgagaccctgtctcaaaaaacaaacaaacaaacaaaaacccatctcctggttctccttaatttcacttccctcttttccagccagaagctaaggtagctgaaggggtagaaattgcagatctttctttatgtagcaagagagaggaactgggaaagcagtgagtgtccctgtaggacaggggtcttcttattttattttatttttttgagacagagtctcgctttgtcgcccaggctggagtgcagtggtgcggtctcggctcactgcaacctccatctccccagctcaagcaattcttctgcctcagcctcctgagtagctgggattacaggtgcccacctgtaattaaccgcatccagctaattttgtagttttagtagagacggggcttccccatgttggccaaggctggtcttgaactcctgacctcaggtgatccacccgcctcggcctcccaaagtgctgggattacaggtgtgaaccactgtgcctggcctgacaggggtcttctgatcactcctcagtgcctcccaacccaccatacagagcacaaagtgttaaccctaaggcagaatgtgaacatggggaaacaaatgcaattttaaaaaacaaccagccaaacaaaaaaatccctaatggtggaaatgctgtttgtttttttttcatttggtagcaatgattaccatcatgctcctctcctgccacaatgacgtcagcccctgatgctgaaacttggtgacacttctgtgcttgtccccagtgagggctgaggtgcacaacctgggaactcctagaacaagtgactgatgccaaaggtgtggaccagcctctgcaaggacagacacctttcttttgtgtgtcccagactttttttttggatggtggattctgatttgcctccttccccaacgatggctattaaaatacctgaaaccataaaatgcccctttgtcaaggatggatctaggttttgtgaggcgtaaacaaatacatttctgccgcaaagtttacatgaacaagtgagcaggcgaacctactgccgcgctcctctctgaccttgaagggtgggcgcaagctcaggtctcattcattcactatttgttgttcagtgctcccaaacacccaattgttgcccttgacaacaaacacatgaatttaagaagaggagttcaggccaggcacggtggctcacgcctgtaattccagcactttgggaggccgaggggggtggatcacttgagatcaggagtttgagaccagcctggccaacgtggtgaaaccccatctctactaaaaatacaaaaattagccgggcgtggtggcgttgcgcctataatcccagctactcaggatcctgaggcaggagaattgcttgagcctgggaggcagaggttgcagtgagccgaaatcgcaccactgcactccagcctgggcaacagagaaagactccgtctgaaaattaaaaaaaaaaaaaaaaaagaggagagtttgttgactaatatgggtcgttgacataaatattctgtgtgtgattgtattcaacacatttcattttttggttgtgattttttttttttttttttttttttgagacggaatctcgctctgtcgcccaggctggagggcagtggcgcgatctcggctcactgcaagctccacctcccgggttcacaccattcttctgcctcagcctcccgagtagctgggactacaggcgcccgccaccacgcccagctatttttttttgtattttttttagtggagacggggtttcaccgtgttagccaggatggtctcgatctcctgaccttgtgatccgcccgtctcggtctcccaaagtgctggcattacaggcgtgagccaccgcgcccggctggttaattgtgctttttaaaaaatatctcccatccccataaatatgtacacctactatgtgcccacataattaaaaattaaacaattttaatcccctaaaaataaaaaaggagaccaagcatgtggagaaataaatgtctcaacacaccataagggtgtattggagtggcccttctatgattttgacaatgatattaaacgtcctggccgggcgcggtggctcatccctgtaatcccagcattttaggaggccgaggcaggaggatggcttgaacctaggacttagaggtcagcccaggcaacatagcgagaccgcgtctctacaaaaaaaaaaaaaaaaaaaaaaagcaagtatcttgcatttgcaattcgtcggatgcctgcaaagttccgtgggtgtgtgatgtaggaatctggggcacgggaagttattcttgcttcatttcctgacgctgaccggctgggcggggtccctggggcacccgggcacatttggacgtgtttggcagggagagtcctggcccagccccggcacgtagggccgcgcttccacgggccgccgccaggagacgcgcgaggctgtagatgcggctttgcagagaagctgggagggtagaggggctggggcggtcgaggggcggggctgcgtgcagccggcccagattcctttccggccagttccttccaggagctgctcccacgtctacagcgccgtctgctactcacccagctctcttgtatctgagcctcattttcccaccgtcctttaagcccgttttcccactgctcatttgcagccaagtttccatctcgcatctttgcgtcccccttctctgcaccctcctttgcacccccattttcctgctttcccttgagtccacatttcccagacctcctttgccccctacattttccaatgctctcttgcatgcccatttatcaccctcttttgtgcccccatttccaggccctcagcccctggttctgaggttccttacttcaaatgaccttttttttttttttttttttttcctgaaacggaggagtctccctctgtctcccgggctggagtgcagtgatgtggtctcggctcactgcaacctccgcctcccgggttcaagagattctcctgcctcagcctcccgagtagctgggactgcaggcacccgccaccacaaccggctaattttttgtatttttagtagagacagggtttcactgcattagccaggatggtctcgatctcctgacctcgtgatctacccacctcggcctcccaaagtgctgggattactggcgtgagccaccgcgcctggcttcaaatgacctcttaaataaaggtgtggaaggacacactcctggctgtgaacagcacccgtggtccaggaggagacagcactcctctgtgaacatcttgcttagttctacatgttccaagaagcaggcgatttgacagacattcattaaattaattaaagtgtaaggtattttctcccatttgaaccatccgccttcccccaatccatgcaggacctggacccagacacaccccagcccagggctggacagagaggggatcggggtggggcaatgtgaagctgctatggttagggtggggaggtatgggggcaaagtgggctacagactgcaggatctaggcctggaggtcttcagtgctgacatacagaaggtttttggtcctgaaatgctaactacatctatcaccatggagaaaagcccaatgacctgctacttgggaggctaaggtgggaggatcacttgagccagggaggtcgtggctgcagtaagccatgatcacaccactgcactccagcctgggcaatggagcaagatcctgtctcaaaagaaaaaaacccagtgaccaatggctcacagttccaggactctctgccttacaggttcctgccctcatgttactcttggggcttcaaagcctggtcttgcttcctgtgtggcctcaggcagttcccttggcctctctgagccctgtatgaaggatgggccaagtatgggcttgggcttgggaggcccggtggcttgtagctagatttctgcatcacagagcctctggatccattcattcattctccgcgggtttcttaagtactgcagtgccaggctttggggacacagctgtttttgtttttgttttgttttgtttgagacagagtctcactccgtcaaccaggctggagtggaatggcacgacctcagatcactgcaacctccacctcctgggttcaagtgattctcctgccccagcctcccaagtagctgggattataggcgtgtgccaccacacccaggtaatttttgtattgtttgtattgttagtaggtctcaaactcctgacctcaggtgattcgcccgtctccgcctcccaacatgctttgactacaggtgtgagccactgcgcctggcaggggtcacagctgttaataggacagcccaagttcccccctcccccgcttggatcccccagtctactaggagatgtcaactgtgcaagtggttagctctgggcactatgcccacagggtcctggtggcatctggagggtaccagggtagcataccatgcctgttctctttccctgctgtgacctgtttgaaggatgaggagccaacagggggcagtttggggcacctgatttccctggaccatgagccttgctccagaacccaattgtgatgtgataaaaggcttatgaccagggcagggggcagctgctgggccgccttggacaaccatcaggcagccaggacacagaggggcagagcaagtcagcattggcgccccttcctcagatccctatcatcttgggaaacagtagcccagaggttcaggaagatgttaacttaaatgttcagggtgccccagtctgttcagcatggctgaaatccacactccgtattcttccttgaagaaactgttatctttactcaatggcttcgtggctgtaagtatgtcacaatccaggcccctggtttgttgcagcccttcctccacagtcagctccctgaaagacagaaataagttgatccaaattggcatcgagatctgtggttccctggagaagcaggagggatgtagggcagacggaggaggaggagcagggagcgtggggacctccatcaaccgagagctggtgaaatccagcacagatgagtgtgatctgggggagcccaggtgggtgatggaagagcttggctctaagtcaaatcctgtagccgaccaagttgtttgggaaggccaggagaaagggttattttcttgatcttttaaatttgtcacatttttttccttaccgtaaaagtaacccgaaatgtacattgctaaggaattgtcaggccgggggcgctggctcatgcctgtaatcccaacgctttgggaggccaaggcgggtggatcacgaggtcaggagttcaagaccagccttggtcaatatggggaaaccccatctctactaaaaatacaaaaaaattagatgggcgtggtggcacgtgcctataatcccagctactcaggaggctgaggcatgtgaattgcttgaacctgggcggcagaggttggcagtgagccgagattgtgtcactgcactccagcctgggcaacatagcgagactctgtctcaataaaaaaataaaagaataaaaacataaaaagaagtaattgtcttcattgtagcatagtctaaggaaaagctgccaggaaagagaaggaaatgaaatatcactcctcctcttcacttgtaacattttaaagagaattaaggccggctgtggtgactcatgcctgtaatcccagcactttgggaggccgaggtgggcagatccattgagccaggagctcgagaccagctatagtgagatccccatctctatttaaaaaataataatacaaaataaagtgttattggaacatggccgtgctcacttatttggagattgtgaacagctgcttttgggctacaccaatagaactgcgtagtttcaacagacaccttaagtcctgcagaggccacaacatctgggtttttcagaaaaaaaaaattgctaatccctgtcctatgacattattttattttattttattttattttattttgagacggagtcttgctctgtcacccaggctggagtgcagtggcatgatctcagctcactgcaacctccacctcccaggtttaagcgattcttctgcctcagcctcctgagtagctgggattacaggtgcccaccaccacgcccggccaatttttgtatttttagtagagacagggtttcgccatgttggccaggctggtctcgaactcctgacctcaggtgatccacctgcttcggcctcccaaagtgctgggattacaggtgtgagccactgtggctggcctattttattttttgagacaaggtcttgatctgtcatccaggctggagtacagtggcacagtcatagctcactgcagtctcaacctcatgagctaaagtgatcctcccactgcagacacctgagtagctgagactacaggcacgcactactactggctattttttttttgttggggagagggtacagatgaggtcttaccaagctggtcttgaactcctgggctcaagtcttggccttggcctcccaaagtgctgggattacaggcatgagccaccgcactcacccagttctatttgtatacaactaacagattacttttcttcctttctggtttctgttctaaaggtgtctggcatcatcctagttggcctgggcattggtggtaaatgtggaggggcctctctgacgaatgtcctcgggctgtcctccgcatacctccttcacgttggcaacctgtgcctggtgatgggatgcatcacggtactgcttggctgtgccgggtggtatggagcgactaaagagagcagaggcacgctcttgtttgtaagttggatctgcacacagaccccagaactgcctccccacacacacaaatcttttattgtgcgtgttgcaaacaactttgcttggtgtcacctattttttttttttttgcggggacagggtttcactctgtcgcccaggctggagtgcagtggcacaatcttggttcactgcaacctctgcctcccaggttcaagcgattctcctgcctcagcctcccgagtagctgggattacaggcacccctaccatgccctgctaatttttgtatttttagtagagacgggattttgccatgttggccaggctggtcttgaagtcctgacctcgtgatccacccgcctcggtctcctaaagtgctgggattacaagtgttgagccactgctcccggtcgaattgttttaaactggagaggccagggtggcctggggtggagggtcgggggaacagagacaacccctcacctgcagggtataaggtcgggaggaggctgagcaggctcccaggccctctctccccgtgtgtcttttagtgcatcctgtcaatggttattgtcctcatcatggaagttacagctgccacagtggtccttcttttctttccaattgtaagtacagccctgctcctcccacatagcattagaaagataaagaaccaaggacgggcacagtggctcacgcctctaatcccagcattttgggaggctgagtctggtggatcacctgaggtcatgagtttgagaccagcctggccaacatggtgaaaccccgtctctaccaaaaatacaaaaaattagccaggcgtgatagcacgcacttgtaatccagctactcaggaggctgaggcaggataatcccttgaacccgggaggcagaggttgcagtgagccaagattgcaccactgcactccagcctgggcaacagaatgagactccgttaaaaaaaaaaaaaagatatagaaccaatagaagtccgcccctccccgccaggcacccatgatcgattgtggggacccagtgatggaggggcccatcacacgtgccacctttgatggtgtgagaagctgaaatcctcagcctgcctctccaagtcctcacaaaacctgctgagttcatttagttcatccctcttgggtttggtggcaggagaaggggagatgatcagaagtgtttgcatattgattggggttttgaaatgtattcaaaatagagggacaatttagcaaaatccatccaaatgacaaaagcttcagcactttgacctggcagtcccatctctgggaattattcaagaactcacttgctggtgtgcagaatcacattcatgccagggcatgtgaaagattgcaaagagggccaggtgcggtggctcacgcctataatcccagcactttgggaggccgaggcaggtggatcacctgaggtcaggagttcgagaccagcctggccaacatggtaaaaccccgtctctattaaaaatacaaaaaaactagccaggcctggtggcacatgcctgtaatcccagctattcaggaggctgaggcaggagaatcacttgaacccgggagccagaggttgcagtgagctgagattgtgccattgcactccagcctgggcaacaagagtgaaactctgtctcaaaaaaagaaaaaaaaaaaaaaagaaaagaaaagaaaaaagaaagattgcaaagaacctagtgagtatgaataagggtttaggcaagttaaaatacatcgacacagtggaatcctgtacatcaggtacagggaaggaggcggctctctgggcaccagatggaatgctctccaggatagagtgccgtcctcattggcatcctccccagaggctgaccctgaaacaataattcaaaggcatgtggtttatttgagaggtgatcccagaaaacacctgcaggggacatggcaaatgaggcaggtaagggaagacagcccacaaaaggggatgctgggcacagcatagaacatgcacctaggttattccactcaagtggagagggagctgggatattgatccaccaactccaaccagccattgatggagggctgctcccagggggcatgtgggctcagaggccagagaatcctcacttgctggcactagggagtcaggccagtaggcacagaactgacaagggccacagagttatgggcaggccaccaagagcccctgctactcctgtcgagaacagccagacgcagaaaaatgagtgcagcataaaccaaagaggaagaatagtgaaaatatactttgctttgacacacatagaagaacatctctttggggacacaggaaacagttaacagtcattggcatggagtgggaggaaacttttggctgggaggaaggggtgggagagagacttttcatggtctgttctcctgtgcatgtcaatttcgaaccacgtgcctctatcatcgctttgcaaaaggattttttaaacctttatttaaaaaacagaaaattaaatgtgccccttttgtgcagacagagattccgtggaagatgatattcaattctttaatggagttacagccacatcgtgggtgcagcagggtgtaggcgattccaaagagcagatgattcaaattcgtgtgcgatgggtacagagagatacgcttggctccagacccacgcgtctccctgtttccctctcttgtggtgggggcacagtagccttcgtgtgtcttcctctagcacagacccctgagctgagggtaggaaaaatgaaggcagcacgagggacgctcccacctcccactctatcctcaagaacctcggccaatgaacgggccactcttgctagttggggtactgatcacttcctgtcctctctgtgaggttggagatgtggccttggaacacaccttcgtgaccctgaggaagaattacagaggttacaacgagccagacgactattctacacagtggaacttggtcatggagaaggtgaggcttacttaaaaaaaaaaaattgtggtgtaaaggtacacaacatgggcgggcgaagtggctcacacctgtaatcccagcactttgggaggccgaggtgggaggatcacttgaggtcaggagtttgagaccagctgagccaacatggtgaaaccccgtctctactaaaaatacaaaaattacctccgtgtggtggcaggcatctgtagtctcagctactcaggaggctgaggcaggagaatagctcgaacccaggaggtagaggttgcagtgagttgagatggcaccactgcatcccagcctgggcgacagagggaggctctgtttaaaaaaaaaaaaaaaagccagtcacagtggcacatgcttgtggtcccagctactaaggaggctgaggtgggaggatcacttgagtccaggaagtcaaggcttcagtgaactatgatggtgccactgcactctagcctgggtgacagagcaagaccctgtatcttgtaaacatgaaatgtatcgtttaacatttttttttttttgagttggagtctcattctgttgcctaggctggagtgcagtggcgcaatctcagctcactgcaacctccacctcccaggttcaagcaattctcctgtcttagcctcccaagtagctgggattagaggcgcccaccaccacacctggctaatttttgtatttttagtagagacggggtttcaccatatgggtcaggctggtctcaaactcctgacctcaggtgatccacccgccttggcatcccaaagttctgggattataggcgtgagccaccgtgcccggccccatttaacaattttgaagtgtgcagttcagcggcattaagcacattcgcattgttgtgcgaccatcaccaccatctctagaacttccttatcttcccaaactaaaactctgtcccatgaaacgctcactccacattctccctccccaagcccctggcacccaccatgctcctgtctgtctatatgaatctgacgactctagggacctcctaggagtgaaatcaggcagtgtgtgtctttactaaaaatacaaacattagccaggcatggtggcgtgtgcctgtaatcccagctactcgggaggctgaggcaggagaatcgcttgaatccgggaggcagaggctgcggtgagccaggatcatgccactgcattgcagcctgggcaacagagtgaggctccatctcaaaaaaaaaaaaaaaaaaaaaaagggatttgctagattctatggcaattctgctttgtatatatacatatatatttatatacatatgtatataaatatatatatacacacatacatatatatatacacatacatatatatatatatatatacacacacacacacacacacacacacacatacatatatatattcacatatatatttttgagacaggatctcactctgttgcccaggctggagtgcggtaaggggatcatggctcactgcaacctctgcctcccaggctgaagcaaccttcccacctcagcctcttgagtagctgggactgcaggttcgtgccaccatgcctggctaatttttttttttttttttgtagatatggggtttcaccatgttgctcaggctgatcttaaaaactcctggcctcagccgccccgtccgggaggtgaggggcgcctctgcccggccgcccctactgggaagtgaggagcccctctgccccgccaccaccccgtctgggaggtgtgcccaacagctcattgagaacgggccaggatgacaatcgcggctttgtggaatagaaaggggggaaaggtggggaaaagattgagaaatcggatggttgtcgtgtctgtgtagaaagaagtagacatgggagacttttcattttgttctgtactaagaaaaattcttctgccttgggatcctgttgatctgtgaccttacccccaaccctgtgctctctgaaacatgtgctgtgtccactcagggttaaatggattaagggcggtgcaagatgtgctttgttaaacagatgcttgaaggcagcatgctcgttaagagtcgtcaccactccctaatctcaagttcccagggacacaaacactgcggaaggccgcagggtcctctgcctaggaaaaccagagacctttgttcacttgtttatctgctgaccttccctccactattgtcctatgaccctgccaaatccccctctgtgagaaacacccaagaatgatcaataaaaaataaataaataaataaattaaaaaaaaaaaaaaaaaaaactcctggcctcaagcgatcctcctaactcagcctcccaaagtgctgggattacaggggtagccaccacactggcctacgttttttgaggaactgccagactcctttccacagtggctgcaccattttccattcccatcagcaatgcaggagtctaatttctccacgtccttgacacctgtcattttctgggtttgtttttttttgagatggagtctcactctgtcacccaagttggagtgcagtggcgcaatcttggcccactgcaacctccgcctcctgggttcaagtgattgtcctgccttagcctcccaggtagctgggattacaggcgtgcactaccgtacctggctaatttttgtctctagtagagacaggacttcaccatgttggccaggctggtctcaaatttttgacctgaagtgatccacccaccttgacttcccaaagtgctgggattacaggtgtgagccaccgtgcacggccaattttctgttattttgatcattgccatcctaatgagtgtgaggtggtgagactcccatcttgattcttggcatttaaggagcaagactggcctttaagtgttatttaagcttttgagacaggtggttgaggccaggcagggagggttcaaagtggggaaagccattgcctgtctccaggagcatttcacacctgagttgtaggtccaggagctgctgtgggttgatggccaggctttgaaaggaacatgtgatagggaacaatttatttatgtacttaagacagagtcgtactcccaaaactcaggctggagttcagtggcgcaatctcggctcactgcaggcacaacttcccaagctcaggtgattcttgtacctcagcctcccgagtagctgggactacaggtgcacaccaccacacccagctaatttttaaaatttttatttttatttatttattttgagatggagtctcgctctgttgcccaggctggagtgcagtggcatgacctcggctcactgcaagttccgcctcccaggttcatgccattctcctgcctcagcctcctgagtagctgggaccacaggtgcctgccatcacgcccggctaattttttgtatttttagtagaaacggggtttcaccatgttagccaggatgatcttgatctcctgacctcgtgatctgtccgcctcggcctcccaaagtgctgggattacaggcgtgagccactgtgcccagcctaaaatttttagtagagacctttcagcatgttgcccaggctggtctcgaactcctgggctcaagtgatctgcctgcttagtcttcctaaagtgctaggattatagctgtgagccactgcgcccagcttcatttattaaaaaaaaaaaagttttgctccctgtgttgcccagactggtcttgaactcgtcgcctgaagtgatcttcctgaattggcttctcaaagtgttgggattataggcatgagtcactgcaactggctgatgcctttctgcatgctgcttttggcttctcaagcttgtgatggtacagaatgtctctctttcattcattcatacagtcctcccactaatatttattgagcacctgctatgagtcaggcactctatagggtttttgttagggtacaaaaaaaatccttgttggtgctgggcgcagtggctcatgcctgcaattccagcactttgggaggctgaggcaggtggatcacctgaggtcagcagttcgagaccagcctggccaacatagcgaaaccccgtctctactaaaaatacaaaaattagccgggcatggtggtgcatgcctgtaatcccagctactcgggaggccgaggtaggagaattgcttgaacccaggaggtggaagttgcagagagccaagatcgcgccattgcactccaacctgggcaacagacagagactgtgtctcaaaaaaaataataaaaataaaaataaaaataaaaataaaaataaaatccttgttgggccaggtgcagtggctcacatctgtaatcctagcactttgggaggctgagatgggtggatcgcttgaggctaagagtttgagaccagcccaggcaacatagcaagacccatctctacaatagataaaaaatgtagccaggcgtgatggcctgcacctgtagtcccagctactcaggaggcagaggagggagaatcgcttgagcccagaagattgaggttgcagtaagctacgatctcagcactgcacttcaaattcattcttccattactgacatgtgaatgaagagatgggcaatctctggttcttccgttactgacatgtgagtggagagatgggcaagaaaccaataactaaacattggtatcaggttcataactgctgtgaataaaaacaaggcagggccgggcacggtggctcacgccgctaatcccagcactttgggaggacaaggagggtggatcacttgaggtcaggaattcgagaccagcctggccaacgtggcataaacctgtctctactaaaaatacaaaaattagccaggcgtgggggcgtgtgcctgaaatcccagctactcgggagactgaggcaggagaatcactgaggagttcagcttttttttctttttagagacaggtcttgctctgttgcccagggtggaatgtagtggtgaggtcatagctcactgcagccttgatctcccgggctcaagagatcctctagcctgagcctcctgagtagctgggaataccggcatctgccaccatgcctggctaatttttaaatttttttgccgagatggggtctcaccctgttgcccaggctaggagttcagcttttaccctgagtgagatgggagccagggagggttctgggctgtgatgggatgtttgtaagaggatgtttagcacagtctctgggatattgtgaccatactagacggtagccatggtaaccgtgatttctgatgtttttattatttgaaagggactctccaagtatttcttctcctctctatagctaaagtgctgtggggtgaataactacacagatttttctggctcttccttcgaaatgacaacgggccacacctaccccaggagttgctgtaaatccatcggaagtgtgtcctgtgacggacgcgatgtgtctccaaacgtcatccaccagaaggtaactggagattttgtgtgttgccttgacagacccctgagggctggtgacttcatttttatttttatcttattttgagaaagagtttcacccttgtcacccaggctggagtgcagtggtgcgatctcggctcactgcaacctccgcctcccaggttcaagtgattctcccgccccagcctcccaagtagctgggatcacaggcatgcaccgccacacccggctaattttgtatttttagtagagatggggtttcaccatgttggccaggctggtctcgaacctcaggtgatccacccaccttggcctcccaaagtgctgggattacaggcatgagctactgtacccagcctttttatttatttatttagttagttattttgagatggagtttcactgtgtctcccaggctggagtgcaatggtgccatcttggctcactgcaacctccgcctcctgggttcaagtgattctcctgcctcagcctcccgagtagctgggattacaggtgtgtgccaccacgcccggctgatttttgtatttttactagagatggggtttcctcatgttggccaggctggtctcaaactcctgagctcaagtgatcctcccacctcggcctcccaaagtgctgggattacaggcatgagccaccacacccggccttatttttatttttttagagatagggtctcactctgttgcccaggcaggagtgcaatggtgcaatcacggctcactgcagcctcaaactcctgggctcaagtgatcctcctgcctcagcctcccgagtagctgggaccacaggcacgtgccaccatgcctggctaatttttttttaatttttatttttaatagagatgaggccttagtatgttgcccaggctggtctcgaactcctggcctcaagcaatcctcctgcctcagcctctcaaaatgctgggattacaggcatgaaccaccacacccagcctggtaactttaataaaaattgcttcttttgggggacccctgcaaagggggtcagggagaaagaaatcaactcttattgagtgttcagcttattttgacaacacagagcagggacttacggttaccttctctcagaaactgaggctcggggaggggacatcactagttcaagatcacagagctttggcagagttggaatttgaagccccattggcctgagtccattgccggcaccacactacctgccttctagagaccctaaatggagcaataaccatgaaaagtgatcatcctagcgggagtgagggccagccacgtgatggagcactcactttgtgagttttgtcccatcctatcccttgaggtggggaactactcttctctcattttgcagataaggaaactgaggtacagagcatttcctgtgtccagggagtaatgagctgggtttcaagccacaccccagttcccccttaacttcttccacgagtgaatgagcacagagatcttctctgagggaagaaatagaaatcagagccagggcaacatagcaaagtccccatcacaacaacaacaaattttgtttttttgagacggagtcttgctctatcacccagactggagtgcagtggcgcaatctcgactcaccgcagcctccgcctcccaggttcaggtgattctcctgcctcagcctcccgagtagctgggattacaggcgtgtgctaccacgcccagctaatttttgcatttttttttttttttgagacggagtcttgctctgtcgcccaggctggagtgcagtagcgcaatcttggcttactgcaagctctgcctcccaggttcatgccattctcctgcctcagcctcctgagtagctgggactacaggctcctgccagcatgcccagctaatttttttgtacatttttagtagagacggggtttcaccgtgttagccaggatggtctccatctcctgacctcatgatccgcccgcctcggcctcccaaagtgctgggattacaggcgtgagccaccgcgcctggcctaatttttgcatttttagtagaaacggggttttaccatgttggtcaggctggtcttgaactcctgacctcaggtgatcctcccacctcagcctcccaaagtgctaggattacaggcatgagccaccctgcctggctaaaaaacattttttatattagctgagtgtggtgacacatgcctaagtcccagctattctggtggttgaggtgggaggatcacttaagtccagtagttcaagaccagccttggcaacatagcaagatgccgtttttacaaaaaaattaaaaatcagctgggcatggtggcatgaacctgtagtcccagctaactgggaggctgaggcaggaggatcgattgagcccaggaggtcaaggctgcagtgagccgtgattgtgccgctgcactccggcctgggccacagagcaagacccctctctaaaatagacaaaaaaaaaaaaaagaagaagaaatatgaatcgttcattccttcatttgcactgaatggctcatgcagggaaataggccctgtggaaaatcagccaggttgagtcccaggcaggggcctcagagacagacacgggccagacactggcccactgggccctacacaacctacctgtcacctcctaacctttcccccttgctcactctgttccagcacactggcctcctcgctactgctcagaaacaccaggcacatgcctgcctcaccgcctttgcacaggctttccctctgcctggagtgctcttccttcacgtcttcctacctctcaagtctttactcaactggcactttctccgtgaggctgttctgacttcccatctataaaagtatccctcatcccagtgatcatgctctgtcttcataccctgtttctgtgtctttccagcatttatcaccactttacagtattatcactatgcttgccgttagctgttctccccactcaaatgtcagccccatgagggcaggaattttgtctgttttatacattgctgggttgccactgtccaattcagtgccaggcacttaaatacctattatgtggccaagtgtgatggctcatgcctgtaatcccagtactttaggaggccaaggcaggaggatcacttgaggacaggagttcaagaccagcctgaacaacatagcaagaccctcatcttcaggaaaaatttacagattaactgggtgtggtgttgttgcacacctgtaatttcagctgcttgggaggctgacgcaggaggattgcttgaacccaggagttcaaggctgcagtgagctatggtcatgccactgcatccagtctgagtgacaggacgagacccaatctaagaaaaaaaaaaactattatgtgaaagggggcacggaacagtgacaacagcaagttcaatgtggcccaagcctccagaggtgagatgtgccaggggcctagaagagggagctactctggaagtgcaggaagaaggaagaaggccgggtgtggtggctcacgcctgtagtcccagcactttgggaggctgaggtgtgtggatcacctgaggtcaggagttcaccaacatggtgaaacccccatctctactaaaaatacaaaaattagccgggcgtggtggtgggagcctgtaactccagctacttgggaggctgaggcaggagaattgcttgaacccgggaggcggaggttgcggtgagccaagttagcgccactacactccagcctgggcaataagagccaaattccgtctcaaaaaaaaaaaaaaaaaagtgcaggaaggagagaggaggccctaccatcttcaggaggatgccctgccaacgcactttgcctggtatcctaatatctctgagcctcagtttcctcatctgtaaaatggaggaaagaagagtacccaaattatggggttatagtgagaaatgagtaagaaaatatgtggacggagaagccactgaatacgtcagctcttctgttcatatgtaaagagcacttaaaaataactaacagttattgaatgctggctacatgtcagaccactgcaatgtatttcatgtagattcattcttttatatttatgtatttatttagagacgggttcttgctctgtcactcaggctggatggagtacagtggtgcaaacatggctcactgcagccttgacctcctaggctcaaatgatcctcccgtctcagccccccaagtatctgggactacaggcacataccaccacactggctaatttttttattttttgtagagacggggtttcgctacgttgtccaggtcaatctcgaactcctgggctcagggaatctgccagcctcggcctctcagagttctgggattacgggcatgagccatcgtgcccagccttattaattctttatttagagatggagtctcactctgtcgacaagctggaatgcagtggtacaatctcggctcactacaacctccgattccctggttcaagtgattctcctgcctcagcctcccgagtagctggaattacaggcaccgccaccatgcctggctatatttttgtatttttagtagagatggggtttcaccatgttaaccagtatggtcttgatctcctgacctcgttatccacctgcctccgcctcccaaagtgctgagattataggcatgaaccaccacgcccagcctatttatttatttttgagacagggtattgctgtgtcccctgggctggagtgcagtggcatgatcatggctcactgaagcctcgactggctgagctcaagcaatcctcctgccccaatctcccaagtagctgggactacagccacacaccaggctaatatttacattttttatagagagggagtctcactatgttacccagactggtcttgaactcccgggctcaagtgatcctcccatcttggcttcccaaagtgctgggattatagacatgagctaccatgcctggcctttgattcttttactcctcatgaaattcttgtaaggcagatccagtgggtgccatttatagatgggaaaatggaggtacagagaggtatagcgacttctccaaggtcacacagctagtaataatcgaggatgtccaaccacacttaattgccacactggaacattagcacagacaagtagaagggaatcatcggtatattcttttgggggaatgaggaggacagggaagatgctagggtggcggggagcgggtggcagtcaaatgagatggagggaaggccctcacggctctctccccgcttctcctcaaagaatctgagagtcgtctgagtggcctaatgagttggggttgatggggacttgcaatccataagcccctaaccacctcctgcttgttttggtgtttgtttcctcagggctgtttccataaactcctaaaaatcaccaagactcagagcttcaccctgagtgggagctctctgggagctgcagtgatacaggtaagacccagcctctctagggtctttgagctgttttattaagcacctactgtatgccaaacactgttctggtcactgggacacaggagtgaacaaaactaaaaaaaaaaaaaaaaagaaactcaacaaagaagaacaaactaaacccaaatcaagcagaaggaagatgctaaagattagagtgaaaatatgaaaataaatgaaatggagaacatcaataaaaccaaaatttgattctttgaaaagataaaacaggtcgggtataatggctcagcctgtaattctagcactttgggaggctgaggcaggaggactgcttgagcccaggagttcaaaatcagcctgggcaacatagtgagactccccatctctacaaaaacaaaaataagaaaattatccaggtgtggtggcagatgcttgtagtcccagctacttggggggctgaggcagggggatcacttgagcctgggatatcaaggctagtgaggcatgattgtgtcactgcactccatcctgagtgacagagtgagatcatgtcacaaaaaaagataaaattgacagaactttagtagactgaagggcaaaaaaagggaaagattactcaaattagtaacattaggaatgaaagagagacatcactactgaccttacagaaataaagcaactataagggaaaagtgtgaacctgtatgccaataaattagctaacctagatgaaatagacaaattcctagataaacataaactaccaaaactgactcaagaagaaatagaatatgtaaatagatctacagcaagtaatgacattaaattagtaaccaaaaaacttcccacaaagaaaatatcaggcccagatatcctcactggaaatattaccaaacttttaaagaattaacaccattgtttcacctgcaaactctgccaataaaaaagaggaagacatatttcccagtttattctatgacaccaatacaagatattgcaatgacataagaaagtaaaactacaaggctgggtgtggtagctcatgcctgtaatcccagaattttgggaggctgaggcaggcggctcacgaggtgaagagatcgagaccagcctgacgaacatggtgaaaccctgtctctactaaaaataaaaaaattagctgggcgtagtgatgcacgcctgtaatctcagctgagattacagctgggatttgggttgctgaggcaggagaatcgcttgaatctgggaggtggaatttacagtgagccgagattgcaccactgcactccagccttggcaacagagcaagactctgtctcaaaaaaaaaaaaaaaattatatcttaataaaaagacaagtaacccaactaaaatggacaaaggattcaaatagagatttttatccaaagaaggcatacagatggccagtaatcacataaaaaatgctctaccacccatcattaattagggaaatgccaataaaaacactttattctcactaggatggctaaagataataacaagtgttgccaaggatgtggagatatttgaatccttacacattgttgatgagattgtaaaatggtgaagccatttcctaaaatgttaaacacagaattattatttgtcccagcaacttctctcctatgtttataatccaagataattgaagacatgtatccatacaaaaacctttacgtaaatgctcatagcaggattattcataataatcaaaaagtagataaaacccaaatgtacatcaagtgatgaatggataaagaaaatgcatatccattcaataaaatattattcaacaacaaaaacttattgatatatgctacaacgtggatgacccatatcaacatcatgctaagtgtaagaagccagtcatgatattatatgattccattatataaaatgttcagaataggcaagtccatagaaataaaaggtagttagtgattgccagggaccagagggtacgggaagaatggggagtgactgataataggtatggcgtttctgtggttcatgatgaaaatgttcttaagttatatagtagtgatggtagcccaactctgaatatactaaaaaccattgaactgtatactttagaaaggtaacctgtatagtctatcaattatatctcaatgttatttaataaaaagtgctccatgcccctggttgcccaagaaatttttcctacatgctttctgcacattgactaccaacatagtagtgtcttttctgcaaatcgccactaactgagacaaggctctatcttaccagtctgggatatttatttctttggggtaatttttttcattgtacaaatttataatattgaatatgtacttgtaaactatacaacaccttcctccccaaggatcccagcaggaaacagcattcagcccccagatggtccatttaagatgttttcaggggcctccttgcagaggggtgacagggttcagtgaaatgaggcgcccaggagctaaagacatggggaacttttatttctcctaggcctgaaggctctagaaagggcatgaagagggtaggagcccagaaggaggggaagaaaagagggaggaagtggggaaggaataccctaccattctctcctcccgctcacccgtcttctcccggtgcttcctattggccaagcctaaccggaagttatgtggcagtggagtctggggaatatggtccgtagggctccggggagggccgaagtggagaggatgggccaggcgcggtagttcacgcctgtaatcccagcactttgggaggccgaggcgaatggatcacctgaggtcaggagctcgagaccagcctgaccaacatggtgaaaccccatctctactaaaaatacaaaaattagccgggcgtggtgctgggcgcctgtaattccagctcctcgggaggctgaggcaggagaattgcttgaacccgggagatgaaggttgcaatgagccaagatagtgccacagcactccaacctgggcaacagagtgagactccttctcaataataataataataataataataataataataataataggccaggcgcggtggctcacgcctgtaatcccagcactgtgggaggccgaggtgggcaggtcacgaggtcaggagatcgagacgatcctggctaacacaataaaaccccgtctctactaaaatacaaaaaaattagccaggcgtggtggcggccgcctgtagtcccagctactcgggaggctgaggcaggagaatggcgtgaacctgggaggcggagcttgtagtgagccaagatccgccactgcactccagcctgggcgacagagggagacttcatctcaaaaataaataaataaataaataaataaaataataataaataaaaaataagtggagacgaatgcactgtaaccacagtggctccaacttagcccaggcggttcttcagccatctgtaaaaccctgcccctcgcctttctggaacaggatgctccccttgtccccgtaactccagtatgattctggtttggaggtctctagcattggatccatgtttctttcttcacgcatttcagttgccaggaattcttgccactttgctgctgtttatcaagctgggctgacacccaggcctggagaagatgagacacctgggcccatctggctgctggagattcagtctcagttttatttctctgtggcactcactgcttctggaggggagactgttaataaaagatttgggaaccccctgtccagcctgacttctttctccttactttcatttttggcaatgattttacctcaaaatgcctgaatgagagactatgccctttctcatacaactttcctgttttgtaaattattcttggtgtgtgtgtgtgtgtgtgtgtgtgtgtgtggtttttttttttttttccttttgagagagtcttgctgtgttgccaggctggagtgcaatggcacgatctcagctcactgcaacctccacctccggggttcaagtgagtcttctgcctcagtctcccgagtagctgggattacaggcactcgctaccatgcccagctaattttttgtatgtttagtagagatggggtttcaccatgttggccaggctggtcttgaactcctgagttcaggtgatccacctgcctcggcctcccaatgtgttgggattacaggtgtaagccactgcacccagccagttttgtaaattattctgtgaaaaatctagaactttcacaaaagccaagaacatccatccagagaaacatacacatcacccaggttcaacaatgcaaagattgacatatttgctttatcaatcccctttttacccttgataaagtattttttcttttttaaattgacaagtcataattatatatatttatagggtacaatgtgatgttttgatatatgcatacaatgtggaatgattaaatcaagctaatgaacatatctataggctcacttatcatttttttgtggtgatacatctgtgatcccagcactttgggagactgaggtaggaggatcgcttgagcccaggagtttgagaccagcctgggcaacatagcaagaccccccccgccttttttttttttttttaagatggagtcttgttctgtcacccaggctggagtgcagtggtgtgatctcggcttattgcaaccttcccacattctgggttcaagcaattctcctgctcaggctcccatgtagctgggattacaggcgcctgccaccacgcctggctaattttttgtattgttagtagacatggagtttcaccaggctggtctcaaactcctgccctcaagtgatccgcctgcctcggcctcccaaagcgctgggattacaggtgtgagccactgtgcctggcctgactccatctctacaagacaacaacatcaacaaaaccctccaaaaaacaaacctcagacaatgtcatttcttccctttatatttcagtacacatctctaacgatatgttcatttgcgttcacaaccataacaccgttatcacatctaggataattaacattgcttgtttggcatcccttaatacctaggccattgttgagtcttcctaattggctcaaaacttttttaaagggacagggcctcactctatcacccatgctggagtgcagagatgtgattgttgctcagggtaacctctaactcctgggctcaagggagtctcccatgtcaactttctaagtacatgggactacaggcatgcgccaccacacccagctaattttttttcttttttcttttttcttttttgagacggagtttcgctcttgttgtccaggctggagtgcaatggcacgatcttggctcactgcaacctcagccttccgggttcaagtgactctcctgcctcagcctcctgcctagctgggattacaggcatgtgccaccatgcctggctaatatttgtatttttagtagagacggggtttcatcatgttggccaggattgtctcgaactcctgacctcaggagaattgcttgaacccaggaggtggaggttgcagtgagctgagatcatgtcattgcactccagcctgggcgacagagcaatacactgtctcaaaaaaaaaaaaaagtgtgaaatgcttggggagtgccagatgttctgggcttactgctttctttgtggttttggttatttaccctgttcctcttgtccacatatttcctgaaaagcatgagttaccagccctggctgtagattagaatcacctggaagctttaacaaactacctaaacctgaaccacagatcctgatcttttattattattattatttttttgagacagagtctcgctctgtcccccaggctggagtgcagtggcgcgatctcggctcactgcgagctccgcctcctgggttcacaccattctcctgcctcagcctcccgagtagctgggactacaggcacccgctaccatgcccggctaattttttgtatttttatagagatggggtttcaccgtgttagccaggatggtctcgatcttctgacctcgtgatccgcccccctaggcctcccaaagtgctgggattacaggtgtgagccaccacacccagcctaattttttgtatttttagtagagacggggtttcactttgttagccaggatggtctggatctcctgacctcgtgatctgcccgcctcagcctcccaaagtgctgcaattacaggcgtgagccactgcgcccggccagatcctgatcttctaatttaattgaactgggctgtgacgtgggtctggggatgatcctagtggtttttaagatatagtcatggtcacagctgagcatcaatgaactcaggggttcattcaatgaccatagcatcctgaaccaattctttcagaagaggttgcaaaatggtggtttatctaattccttttctttttcttttttttttgagacagtcttgctctgtcgcccaagctggagtgcagtggcacgatctcagctcactgcaacctctgcctcctggtttcaagcgattcttctgcctcagcctcctgaatagttggagttacaggtgcccgccaccacacacggctaatttttgtatttttagtagagacggggttttgccatgttggccaggctggtctggaactcctgacctcaagtgatcctcccacctcagcctcccaaagtgctgggattacaggcgtaagccactgcccccagccagaaataaacttttttacccacacttctgacaccaaacatgtggggttttccacaccaagtaattctccaattctctgtggacacccgctgggtgttctacaattcagttctgacaccaattacccagagttggtgtgtgaccccacagatttaagggctgagtcccacaaaactgagcttccctcacttcagaggtatcaagtattgagttcccaggttacccatatttctgtccaatgtggctacaaagtcagggggggttctcacaagccccctccctttcaggtttgataatttgctagaatgactcacggatctcaggcaagtgttttacttactactcctgatttattataaaggagacaactcaggccaggcgcagtggcttatgcctgtaatcccagcactctgggaggccaaggcgggcggatcacgaggtaaggagtctgagaccagcctggcctatatgatgaaaccccgtctctactaaaaatgcaaaagttagccgggcgtggtggcacacgccctgtaatcccagctactccggaggctgaggcagaagaatcgcttgaaccgggaggcggagcttgcagtgagccgagatcgcgccactgcactccagcctgggcgacagagcgagactctgtctcaaaacaaacaaaacaaaacaaaacaaaacaaaaaaacaaaaaaaggagacaactcaggaacagccaaatggaagtgataaagagggcaatgtgtgggggatggtgtgcagcacttccacaccctttcttggggaggggggcaccacccttccagcacctccatgtgttcatcaactcagaagctctccaaacctgtcatttaggttgtattttgttttgttttgttttgttttttgagacggagtctcgctctgtcgcccaggctggaatgcagtgacgcgatcttggctcactgcaagctccacctcccgggttcacgccattctcctgcctcagcctcccgcgtagctgggactacaggcgcccgccaccacgcccggctaatttttttgttgtattttcagtggagacggggtcttaccgtgttagccaggatgatctcgatctcttgacctcgtgacctgcccgcctccgcctcccaaggtgctgggattacaggcctgagccactacgcccggccaggacttttttttttttttttgagacggagtttctctcttgtcatccaggctggagtgcaatggcacgatctcggcacaccccaacttctgccccacttgttcaagcgattctcccgcctcagcctcccgagtagctgggattacaggcatgtgccaccaggcccagctatttgttatatttttagtagagatggggttttgtcatgttggccaggctgatctcaaactcctgacctcaagtgatcctcctgcctcagcctcccaaagtgctggaatgacaggcatgagccaccacacctggccaatcctagcactttgggaggccaaggcgggagcatggctggaagctgggagttcaagaccagcctgggcaacatagcaagatcccatctctcaatcactcaatcagctggatgtggtggtgcttgcttgtagttccagaaactcaggaggctgaagtgggaggatcctttgagtccaggagttcgaggctgcagtgagccatgattgtgccactgcactccagccagggccatacggcaagaccttgtctccaaaaaaaaaaaaaagaaaagaaaagaaaaagaaaaaagaaatgctggggagggagattgcagtactaaatcaggggagggggcagtgagaaagtgagatttgcacagtagcccaaaagaggaagttcagttaggggagctttgttgtattagtctgttttcctactgctggaaagaactgcccaagactgggtaatttataaaggaaagaggtttgcccgtgtacggtggttcacgcctgtaatcccagcattttgggaggccaaggtgggcagatcatgaggtcaggcgttcgagaccagcctggccaacgtggtgaaaccccgtctctactaaaaacacaaaaattagccaggcgtagtggagtgtgcctgtaatcccagctactcgggaggctgaggcaggagaattgcttgaacctgggaggcggaggttgcagtgagccaagatggcaccactgcactccagctgggtggcagagtaggactgagtctcaaaaaaaaaaaaacaaaaaaatacccaaaaaaacataagaggtttaatttactcacagttcaacatggctggggaggcctcaggaaatttacaattataacagaaggcaaaggggaagccagataccttcttcacaaggtggcaggaaggagaagagccgagagaaggcggaagaatcccttataaaaccatcagatctcgtgagaactcacttgctatcaggagaacagcatgggggaaccgcccccaggattcaatgacctccacctggtctctcccttgacacgtgaggattatggggattacaattccagatgagatttgggtggggacacaaagccaaaccatatcaactgtgactaccttgggtaagggccatccaggcagaggcagggggaacattctgggcaaaggccttggggcaggggcctggtatgttcagatagcagcaagtaggccagagtggccggaggggagcaagtgtggggaggccagtggagagatgagggtagggaagggatggatcagatcatgcagggccccgggggccacaggaaggacctcagcatttactgcaagtaaggtgggagccatcgaatgttctaagcagaggaggaatgcgctgtgactcaggtgttcacaggtgccctcttgctgctggggagagaactgagctttttactagaagtagttgagggaaatagtgtcctccctaccttccatataacagagctttccaaggtcaaggtggtggccatgggacccagtgggaggcagcccgaggcccggtgaggtttctgctgtgtcttgaagagcccttgactgatatctgcttagttgcaaatcaaaccccctttcccagaaacgcacttcactaatggaaataaaagcacaactatatttgggcacgacggatttaagtttttcttgttgagaagagtacatctttccaaactggacatcaaggaattgctacacagaagaaccacatccaggatagaaaggaccagccagagctcgttcagtagtgtatttcagaatcatcagggaggagccggtagcagaattatcccgttaacactgagaccacatttcacctgttacttatttttctaaatggagtaggagagaaagatgctaaaatgtgatcttgggaggagtcccccagtcccccgaaaaagaagaagaaaaaaaaaaagcagaactccaaacccctgtggtcatggcaatttcccatcaaaactgcccatgtaaaataaacacaagctgctaaaagtgaatgttaagaaggaaggcactggttagtgggtggtcctgaccaatcccctggagctggagaggggttttcccacggcctttggtttaatgtgtctgtaaactcaacaaacctccgtttccctgaggtaatctgcaaaaacatcagttttcagtccccagagaccatttccaattaaacctcaccccccaaatcattcaatgtaacatttgccttatttttagaagaaacaaatgttcccatattattcccagtttttgagagaatcctgaggcagctctctcggctgctacttgaagttgaattcttgaaaaatcttatgtaaacagaaagcttaggccaggtcaggagtaaaatgcagtcaaagctgtttctcatcacacaggtgattacaggttagctctgccctattcaagacaatctgatccattcctttttttgacagcagtttagagacaattggccaacaaaaccagcctggccaacaaggtgaaaccgtcgctactaaaaatgcaaaacttagatgggcgtggtggcaggtgcctgtagtcccagctacttaggaggctgagacaggagaatcgcttgaacccgggaggtggaggttgcagtgagctgagatcatgctactgcactgcggcctgggcgacgagcgactctctgtcttaaaaaaaaaaaaaacaaaaaaacctcagcaggccatactgcatcttgagaagtctttttgaagctactttagtttgactttagtgttaaagtagctaaaaatttttgactcccgcccacatattcagataccctcactttgtgcataggatttgtccattacacctcagtcatctaatttgttggtataaaagataccctcggctgggcgtgatggctcacgcctgtaatcccagcactttgggaggccgaagcaagtggatcacttgaagtcagtttgagacaagcctcaccaacatggtgaaaccccttctctactaaaaatacaaaatttagccgggtgtggtggcaggtgcctgtaatgccagctactcgggaggctgaggcaggagaatcgcttgaaccctggaggtggaggttgcagtaagctgagattgtgccaccgcactccagcctgggcaatagagcgagactctgtatcaaaaaaacaaatgaaaaaaagataccccactccaaagttctaagggtagcctctggtatgaagaaaccagggctccctagaaataaatctaaacttgaaccaggctttccccctcacacataccccagggaagaggctgagctcatgaaagctgcaggaagtcattttggcttcaggggctgggagagcagacacaacctctgaaacagagtcagggacgtgggaacataaaacatccacttagccatcctaacagtgctggtcctgtgaaggggtgttggttggtgtttgggagcaaagaaaaggtgctgcgcccctagagtttggaatctgatgggcagaaagtgcctctaaaccggaggtcaagatgtacatcttcaaactgcacacgtaacctctgagcagaagcccctggaggtggggaccccagcttcagagactccccggcactgatcacagtccatcccccccattcacataaggtcctgccactctcaggctgtctacaaagtacaagcagtgacagcaagttactcaatcctacctcctcaccccttccgcccaacccccagcatcccttagaagtgacccctagtttgaggctgtggtgagctatgattgcaccactgcactccagcctgggtgacagagccagaccatctcaaaaagaaaaaaaaaaaaaaagaagtgactcctccattagcaaaaattgtcacatccctgggccctgccgatgacaaggattgggaaatggacattgggtcttgaagggcccccctcaagtcggagcccaggtgcttacatcagaaagtcgccgacaactgcctgcggtggctgggaacgttgcttcatttccttttctagcaggatgcatgattgggcaagaacttgcttaaaacacaaccagctaaacagctaaacagggcctgggagggaggccccagccccaggctcctggctctgaggttaattaacttctggccgaaagcccagagccggagtgctaggggttgggcgaatctctgcccagtctaatgtggtccatagttccagaattcacttcaggatcagagatgtggtgaacacagcaaaaacagtggcagggtcgtgggtgatgtggatcttgggggaagcttggaaggcacttctggggtccctgaagccggggggttgaggggatctgactccctgtcccttctacaatgggaaaaggctgcttcaatgctgcttttcgcaagtagagggtctgcaggggtcaaagggatcaccatcccaccttggaatccagaaagttcgtgggggcaggctcagagaccagcctgcaggacctgagaaagaggcgccgccttccctggatgaactccaagaacccacactgtgcgaggaagatgaaccatcttccaccagcttgggaatatcagtcctgcccaacccagaagagacctggaaaatggttctaagctagaaggcaccacggatgcccctccatcagaaagagtgggacgtgtcacccatggccaccctcaacacaccctggaaagcagcaagctcatgcacgtcagtgtccctgggcctctgcctgccatgcagagctgagtccccatggtccgcagcctcccaccggggctgcctgaggaacctggcagccacggcgacattgtgaaggaatgagccatgcaggagtcggggagcagttgacaggagggaagggattgccctgagcttggagataaccactgtggctcacgcctcgatcacagtccctgccgaggcaggagaggggtgggtggggggttgggggccatctctagcagctgcagctgctgggctggggggctggagcatcccccacggccgggcctttcccgttgctgcctgagctggagctgggttccagggactcgttcatcttctcgcagatgacatccaccaggcgctcgaagacctgcttcacattgatgttctccttggcactggcttcaaagaactcgaaacctggatgaatgttaaggtggggacactcgtaagacccctgagggcagagtctcagctgtggcatcacagaaacctggcttctaagcctagttctgctctttatcctgctgtgggaccttggttgtgtgcctttgccactccaagcctcagtttgctcacctgtaaaatgggaatgatgatcctaccaatgataaaaatctgtggcaggccaggcgcaggggcttatgcctgtaatcctggcactaaaggaagctacggcgggaggatcgcttgaggccaggagttcaagaccagcctgggcaacatagcaaggccctatctctacaataaatttttttaaaaagtagatgggcggccaggtgaggaggctcatgcctataatcccagcactttgggaggccgaggcgggaggatcatttgaggtcaggagttcaagacccgcctgaccaacatggtgaaaccccatctctactaaaaagacaaaaaattagctgggcatggtggcacgcgtctgtaatcccagctactcgggaggctgaggcaggagaattgcttgaatctgggaggcggaggttatagtgagctgagatcacaccactgtactccagcctgggcaacagagcgagattctattaaaaaaaaaaaaatagaggggcatggtggcgttcacctgcagtctcagctactcggaaggttaaggcaggagaatggtttgagcccaggaggtcaaggcagcagtgagccatgatcacaccactgcacaccagcctgggtgatggagcaagaccctgtctcaaaaacaaaacaaaacgaaaccctgcggctgcagccatggtctggacaatcctaagatctctttgtcacaaggcagtggctgcaagagtataggtgggagggtacatgaagagttctgctgccctgcggccatggcagtgcccacaggtggctatagctcagcttccacccaatttctgctgcacagaaaggcatggtcaggagacccatcaagtcacattttccattgctttttttaaaagagaaacggtctctctctattgcccaggccggggtgtagtggtatgaacatggctcattgcagcctcaacctcctgggctcaagcgatcctcccgccttggccccctgagtagctggggctacaggtgtgccccaccatgcccggctaatttttcaattttttcttttgtagaggtgggggtctcgctatgttgcgcaggctggtcttgaactgctggcctaaagcgatccccccgcctaggcctcccaaagtgctgggtttaccagcgtgagccaccacgctgggcttcctgcatccttttaaggttcctgagggtctgcctgagaggagctgtccctgaatctccatgcagccccacctgccacatcaccaaggtaagccaggaattcagacaaacgcctgccacgttacacgtggccaagggtaagtggacctgtcttctctgtgcgtcatgctgaactatgaaaatggaatcataatgagttagctgtgtaattacccatttattatctgtctccgctactagaaagccagctccaggcaggcaggatttccgcccatggctgtacccagtgcccgacacagagagggtgcttagaaactgtctgctgaatggttgaatgaatgaatgggtaaatgaacaatagcaggggcaggacatgaacttagatctcctactgtcagcccagagatatcaaagccatcccactgtcttcctgggcaaatctggtgtttccttatccacgcgtggctttgcctcataccatctgtgttctttatttttctttttgttgagacagagttttgctcttgtcgcccaggctggagtgtaacggcacgatctcagcccactgcaacctccgtctcccgagttcaagcgattctcctgcttcagcctcccaaggagctgggactgcaggtgtgaaccaccatgccaggctaatttttgtattttcagtagagacagggtttcgctattttggccaggctggtatcgaactcttgacctcagatgatccacctgcctcagcttcccaaagtgctgggattacaggcatgaaccaccgtgcccagcttatttttctgatattaatcaggcgtggtggtatgcgcctgtaatcccaactactcaggaggccaaggcaggagaatcacttgaacccaagagttcaagaccagcctgggtaacatagggagaccctgtctctaaaacaaataaaaattttaaaaaggaaaaaaaatacattttttggatgtcattcaatagagaaatttactggagaaactagaaactacagaaaagtattaagacagcctataatcccagtactttgggagactgaggcaggtgggtacctgagctcacaagtttgagaccagcctgggcaacatagcaagacccagtctctaaagaaaatataaaaattaaggccaggcatggtggttcacgcctgtaataccagcattttgggaggccaaggtgagcggatcacttgaggtctggagtttgagaccagcctggccaacatgatgaaaccccgtctctactaaaaatgcaaaaattagctggccatggtggtgcacacctgtgatcccagctacttaggaggctgaagcaggaggatcacttgaacctgggaggcggaggttgcagtgagccgagattgtgccattgtactccaggctgggtgacagaacaagatattatctcaaaaaaaaaaaaaaaaaaaagaagaaggttggggggtgccaggcgtggtggctcacgcctgtaattccagcactttgggagacggaggtgggcggatcacgaggtcaggagttcgagaccagggccaatacggtgaaaccccgtctctactaaaaatacaaaatttagctttgtgtggtggcacgtgcctgcagtcccagctactcaggaggctgaggcagaagaattgcttgaacccgggaggtgtaggttgcagtgagccgagattatgccactgcactccagcctggcaacagagcaagactccatctctaaataaataaataaataaatattagccaggtgtggtggcatgcacccgtagtcccacctacttgggaggctgaggtgggaggatgacctaagccagggaagttgaggctgcagtgagctgaggtcatgccattgcactccagcctgggcaacagagtgagaccctgtctcaaaacaaaaacacaaagaaatgtatggagatagagataaaagtaatttgtaatctcatcacttggaaacaattactgttggcgttttgctatttagctttctagtctttattcatctttttttttttttttttaagacagagtctccctctgttgcccaggctggagtgcagtggtataatcataactcactacggccttgactcttgggcccccctcagtctcccaagtagctgggactataggggtgtgccaccacacacagccgatttttggtattttttataggggtggggcttcaccatgttgcccatgctggtctctaactgctagactcaagtgatcctctgccttgacctcccaaagtgcaaggattacaggcatgagccaccatgcccagcctttagtctttttctatataaatatgtcatttgttggggttaggtttgtaggggatgtgtgtgtgcacatgtatgtgtgtctggctttttttcctacaaaattggaatcaggccaggcgtggtggctcacacctgtaatcccagcagtttgggaggccgaggcagcggatcacctgaggtcaggagtttgataccagcctgaccaacatggtgaaaccccatctctactaaaaatacaaaagtagccaggcgtggtggcacatgcctgtaatcccagctgttcgggaggctgaggcaggagaattgcttgaacctgggaggcggaggttgcagcgagccaagattgtgccactgcactccagcctgggcaacaagagcgaaactccatctcaaaaaaaaaaataaaacaaaagaaaagaaaaaaaaattgggatcaaattctgtgtcctgctttgtatgccaatcttctttttgtgtgtgtgtgagatacaggctcactccatcacccaggctggaacgcaatggcgcgatcttggctcattgcaacctccgcctcccgggttcaaatggttctcatacctcagctttccaagtagctgggattacaggcacgtgccaccacacccagctaatttttgtatttttggtagagacagggttttaccatgttggccaggctggtctcgaactcctgacatcaagtgatctgcccacttcagcctcccaaagtgctaggattacaggcgtgagccaccgaacctggcctgtactccaatattttaaacataataacagaaagtgagaatccccctttaccccgagaccccagatataatccgcaagtaggtgtggaaagcacctccaagtattccagcccatcgcgggcgttaactgatttcaccacttccaggctaactggggatccagggccctgccccacagaacagagatccagtttctccaacaaagcaatggcaagaataaaaggggaaagggactggttatggcttagaggtcagcaaacctcctctgtaaaaggccagatcgtaaatattttaggctttctgggtcatatggtctctgtctcaattactcaatttcacgcttgaagcactgtttatacccttttctgtattgagacagcctgtaatcacagacgtgtgattaccataaaaatagcaaccatagacaatgcatcaacaaataggcatcaactgagcacgggtgtgagttcactcctgtgatcccagcactttgggaggccaaggtgggaggactgcttaagcccaggagttcaagatcagcccagacaacatggcaagacctatctcttaaaatttttttcttttttgagacggagtctcgctctcttgcccaggctggagtgcagtggcacgatctcggctcactgcaacctctgcctcccaggttcaagcaattctcctgcctcagcctcctgagtagctgggattacaggtgtgtaccaccacacccggctaatttttttgtatttttagtagagacggggtttcaccatgttggccagggtggtctcaagcttctgaccttgtgatccacccgcctcggcctcccaaagtgctgggattacaggcatgagccactgcgcccggcaaaaaaatttttttttaattaggcaggtgtggtggagtacacctggcatcccagctacttgggaggctgaggtgggaggatcacttgagcccaggagttggaggctgctttgagttatgatcgtgccactgcactccagcctgagcaccagagagagaccttgcctcaaaaaaaaaaaaaaaatttaaaaaataaatggttgggaggttgaggcgggtggatcacctgaggtcaggaattccagaccagcctggctaacatagtgaaaccccatctctactaaagatacaaaaattagccaggccccgtggtggtgggtgcctgtaatcccagctactcaggaggctgaggcaagagaatcacttgaactggggaggcggaggtggcaatgagccgaaatcacgccattgcactccagcctgggcgacaagagcaagactccgtgtaaaaaaaaaattcttttaaaagggtatagctgtgtctcagaaaaacttcatttatagatacaaatttgaatttcatataaatttcccatgtcatattattttttttcaaccacttaaaaatgtaaaaaccaaccaggtgccgtggctcatgcctgtaatcccagcactttgggaggctgaggcaggccgactgcttgagcccaggagttcaagaccagcctgggcaatatagtgagacctcatctctacaaaaaataaaaataaaaaattagccagtgtgctggcttatactagtagtcccagctacttgaaaggctgaggcagcagaatcacttgagcccaggtgtctgaggctacagggagctttaaacttattttgtagagttggggtctcactatgttgcccaggctggtctctaacccctgggctcaagcaatcctccctcctcagcctcctaaagtggtgggatcacaccactgtactccagcctgggtgaaagagtgaggctctgtctctattatttaaaaaacgacgacgacaacaaaacagctggagttgcatagtgaagtgtttacagacaaaaggtttcgatgtcaagggtttgctctcaatgctctaggaaaaaaaggaaaagtattttgggggaatagatgattcaagattgaaaaaatgttgagacctaattaagctgaataatgttttatcaaagtctattatacattcctttctacttgtgaatgtatttgaacttttcttagatggagtttcactcttcttacccaggccggagtgcaatggtgcgatctcagctcacacaacctccgcctcctgggttcaagtgattctcctccctcagcctcctgagtagccggaattacaggcatgcgccaccacgaccggctaattttgtatttttagtagagatgaggtttcaccatgttggtcaggttggtctcaaactcctgacctcaggtgatccgcctgcctcggcctcccaaagtgctgggattacaggcgtgagccaccacgcctggccgaacatttctcattttatttcattgttttttgagacaaggtctcactctgtcacccaggctggcatacagtggtgcaatcttggctcaatgcaacctctgcctcccaggctcaagcgatcctcccacctcagcctcctgagtagctgagactataggtgtgagccaccatgcttagctaatttttgcatttttttgtagagacagggtttaccatgttgaccaggctggtctcaaagtcctgggcttcagcgatctacccaccttgccctcccaatgtgctgagagtatttgaacatttttatcacaaaaagttattattttcttccttttttgagacagggtctcgctatattgcccaagctggtctcaaattcttggcctgaagcaatcctcctaattcagtctccagagtagctgggattacaagcacatgccaccattcctggccaaagttatttttttaaaaaagtgtaggccgggactataaaaaccaaccaggtgcagtgactccatctcaaaaaaaaaaagtgttaagaacatctgtgaatcaagctggcagatttcttgcctcatgtgtccaaagaaatatatgtaaaaatgactgctgcagctgcatttgtcagaggaaaaggctagaaataatctccatggctgtcaacagaggaaaaggttaaggaaacacgaaatggaatagtacacagccatgcaaaagaatgagccagctctggggctgatggagaaatatttctttttttttttttttttgagaaagagtcctgctcttctacccaggctggagtgtagtggcgtgatcttggctcactgcaagttccgcctcccgggttcacaccattctcttgcctcagcctcccgagaagctgggactaccggcgcccaccaccacgcctggctaatttttttgtatttttagtagagatggagtttcacagtgttagccaggatgttcttgatctcctgacctcatgatccgccctcttcggcctcccaaagtgctgggattacaagcgtgagccactgcgcccggcagagaaatatttctaggatatattatttagtagaaaagttcaaagtgcaggaaagggtatatacagtagggaacatctgtgtaaaacaaaaaagtagccaatgtgttgtcaatgcctgtgggtgctcagcatatttctggaaagagatacaagaatcagagaagctgggagaccagaactgcaggtggggagtgggttattgccttagtctcttcctgtgccttctgaattttgcacatagggtgctggcttggatggggcttatgggaaagctggggttaaaaactgattgcaagcatcagtttctttctttcctttttttttttttcttttgagacagagtctccccccattgcccaggctggagtgcagtggcgtgatatcggctcactgcagcctccacctctcaggttcaagtgattcttctgcctcagcctcccaagtagctgggattacaggcgtctgtcaccatgcccggctaatttttgtgcatttttagtagagacggggttttgccatgttggccaggctggtctagaactcctggcctcaggtgatctgcctgtctcagcctcccaaagtgctgggatttcaggcatgagccaccacgcccggccacaaataaagttttattggcaaacagtcacacccattcatttatgcattgtctgtggctgctgtcatgcagagttgggtagttgccatagagactgtatggccaaaaatatttactatctggccctttaagaaaaggtttgctgactcctggactaaagaaagcagtcgtatccactattttgctagaacaaaacagccaggcacggtggctcacgcctgtaatcccaacacttcgggaggctgaggcaggtggatcacctgtcaggggttcaagaccagcctggccaacatggcaaaaccccatctctactgaaaatacaaaaatgagtcaggcatgctgcgcacacctgtaatcctggatactcaggaggctgaggaaggagaatcacttgaatgcaggaggtagaggttgcagtgagccaagatcgcaccactgcactctagcctgggcaacagagggagactccatctcaaacaaaaacaaaaacaaaccataaagaacatccccttgggctggtgtggtggctcatgcctgcaatcctagcactttgggaggctgaggagggaggatcacttaaggtcaggagttcgaggccagcctgggaaacatagcgagaccctatctccacgcaaaattaaaaaaaaaggccaggcatggtgcctcacgcttgtaatcccagcactttgggaggccaaggcgggcagatcacgaggtcaggagatggagaccatcctggctaacatggtgaaaccccatctttactaaaaatataaaaaattagctgggcatgtggcacgcgccagtagtaccagctacttgggaggctgaagcaggagaattgcttgaacctgggaggtggaggctgcagtgagccaatacggcaccactgcactccagtctgggtgacagagtgagactccaactcaaaaaaataaaataaacctgggaagcggagcttgcagtgagccgagatcgcgccactgcacttcagcctgggcgacagagcgagactccgtctcaaaaaaataaaaaataaaaaaataaagaacatccccatccttttccatggctgcatagtattccaccatgtgaatatactttatgtccacttggttctccaactgtgagacacctgggggggatctgtaggtttcactcctactaatactactactacactccacacaccatatcccacatgggtgaggatatctctaggatcaatttccagaaatggttttgctgggttcccaggggataggcagtggggcagtgggagttcctgcgcgtggatcccctgcaattagacgggacatgtggcatacacatgggtatcttcctgggcagatcctcaaaggatcagtgactgggttggaccctgaatcagaggatggggatgagggtttggttctgggagaccagggcctgtggcccaggctgggcactaaccaaggtcgtcggcgagcctccggccatcctcagcaggcacaacacgttcgtcctccaggtcacacttgttccccaccaggatgacctgggcgttgtcccaggagtaggtcttgatttgcgtggccctgcagagttaccagtggtgagccatgagccgggggggttaggggtcagaggagagggcaaagatcaggggtccatgatcagcaagcactcaccagtcctgcacagcggcaaaggattcctgattggcgatgtcatacatgagcaggaagcccatggctccccggtagtaggccgtggtgatggtgcggtagcgctcctggcccgctgtgtcctggacaaatggcagtggcagttggctgggaactacctgtttcccagtccacccctgtcttagaggggcactgccctgtactcatagccccagccttacgggggagacacagacttgcttgtacaacctctggtctgatggagaatacacagatcctgccctcacaaccccagtctgatgggggaggcatggattcattaccaagggatctccccagtctgatgagggagagacttgggcttgcccttgaggggttccaagtctcaggggtcagtggcctctcacagacttatgagcccctttgaccttgtctctaagaaccaactgggccagatggtaccatcctgacaggacaccttggtactcttgctaccacgatgattgttaccagcggctaagttgggagagggagctaggtgtgactctgcagaccaggtcggtccaatgggggtcccagggtcccctctaagatggtacccaaaactcttccctgttggtcaccagcacctgggacctttcttttttctttctttctttttttaatagatggggtcttgccctgtcacccatgatggaatgcagcggtgcaatcatagctcactgcagcctcgaactcctgggctcaagcaatcctcttgcctcagcctcctgaatagctgagactacaggcgggagctaccatgctgggctaatgtttaaagttttttttagagatgagatctcgctatgttgtccaggctggtctggaaccgctgggctcaagtgatgctccacctcagcctcccaaagtgttgggattacaggcataagccaccacgctagtgtcacaagtacttcaaacatgtcttaggttagtatcatctccgcaatcagacccccaggaataatactgtttcccgccaggcacagtattacagtggctcatgcctgtaatcccagcgctttgggaggccgaggtgggcggatcacgaggtcaggagttcgagaccagcctggccaacatggtgaaaccccatctctattaaaagtataaaaaattagccgggtgtggtggcgtgcacctgtaatcccagctactcgggagactgaggcagaagaattgcttgaacccaggagacggaggttgcagtgagccaacattgtgccattgtgctccagcctgggcgacagagcaagactctgtctcgagagaaaaaaaaaaaaaaaaggtcgaggcaggagaatcgcttgaacccaggagatggaggttgcagtgagccgagatcccgccactgccctccagcctgggcaacagagtgagactccgtctcaaaaaaaaaaaaagaaccctccaatgaactttcctggagggaccccacccccaacccacagccagcctcccagcctacccagatctgcagcttgatcctcttgtcatggcggtagacggtcttgaccttgaaatcgatgcccacagtactgacgaaggcgggagtgaaggagtcgtccgcgtatcggaacaggaaggaagtcttgcccacactgctgttgcctatcagtagcagtttgaacatatagtcgaagttctgatctgctgcatcccgtgggcctgcctgggtgtctccagctgatgccatcttggcacaagcctcctgggacagggagacctgaaatcctcagggagaggagacgggcgtcctgcaggggaatcaaacatcaagaacagctcctgtgaatgcaccaggcctggattcaaatctcagctcggtcactcggagaccaagtgatgctggatgcatcgcttgccccctctagacctcagtgtcctcttctaaaaaatgggatgtttgtcacagtcccttcctgaaagagtagttggttgtgagcctaaaatgagtttctttctttctttttttttttttttagagacaagatctcgctctgttgcctgaggctggagcgcagtggcgtgatcatagctcactgcagtcttgacctcctgggctcgagtgatcctcctgcctcagcctcccaagtagctgggactacagacatgccaccacatcaggctaatttaaaaaaaatttttttgtagagatggggtctcattatgttgcccatgctggtttcaaactcctctgctcaagcaatcctcctgcctcagccttccaatgtgctaggattacaggcatgagccaccacgcccgacctaaaatgtgtttctttattcattcaacaaatgcttactctctgccgggccctgttctctgtggaaatgcagctgtgaataggacaagaaaaagtccatcctcgggtggtcacgttccttccagtgggaaggtattaacacacgtaacggtcattagacagtgcctggtatagagctggggcacaaaaaatgtgactgctgtttaatcttcacaccctgtggcgtaactgagtctgtattggggtggagggtggggagacctttcctatctggaaacccagaggcctagcaaagggttcaagtgcaaggccgagggtaaggggctctggcccctgcagaactagattctggagaaggcacaggtgtggacttcgccccagcgtgtgcagccggtgtggcccaggtgtaagctggggtggggtggggggaggacctgccagctggataagctggatagagcccctgattaaggcttgggtgttgactttggcaggtgtcagccactggggcgcctgccgcccaccaactcatgccaaatacaaccccttctctgagttccaaggggaaggggttttctatgtacagggcccaggtttagagtccagttctaccccctaaatgggtactgctattttctatttgtcaaaggggccaggcctgtctccttctgcccaaggctgactcactccagccccagtccacggaggcaggagtgagagtccttatacccaaggaaacgatcccagccacttaattaacacaaccccaccaccacgaccactgccgcccacccttggtctttccaggcaatctgtcccacggctaggctccttgaatctgcccacactccaacatgctgcttcatccgagtccaaggtgctccctcaaccctcataacctctcccaggcctcagtttccccagctgtctatggccgctgcgggaaccgcacggagaggctgcagaaggcctggatgcaggcggggcagaggcagagacagccctggcacagctatttctcaactgcctttggggcttttttccattttaaaccaggacccaaccggccccaccccgtgttccaggagaacgagtttaaggaggggaagagaagaggcaggaaacctttccccacgcagggcagggccgcaaggctggggcccccacctcccccagccttagctcacctgtgtcagtcggtcccgcctctttctaaccatctgccgaccctccctcaagcctggccccggagggctcgcctctgttccccttcactagatttggggcgccccagccaatgcaggtggactcaggagtttcccccatcaccatatggtcccaacgcctgtccccagctgggctctctgccccgcccgcgccccatcagcgcttcccaagtgcccagctgggtgggggcgagggcagaggcgttccccgcagccccgcctttgttccccagaccccctaccttcctcccaaacccccgtaccccacagacctgctcggatgcggaggggccgggtgggctgcgctccttcccaggggtgacctcgcgtagggggcgccgcctgcaggggttccgcctgtgaactcgctgcggcttggccctggccgcgaccccgaccccgcagccgcagaagccagcagcctgcagccacccggatcccgcgcgggctccgcccagaaggcggaggaagggccgttcccggagcgggggatgggggaggacgaagaggggccgagtcttgggcggggctttcagagagcgggtgggaggggctggaagctgcaccaagcgtctagagcccgtcctagccaagcaacatctcattttcccagctgcttgtaaagagcttctactatacgcacggctgttaaaagcatagagtcttgggcctggttcgagtcccagctccaccactttctagtcttgtggctttggacgcgttacttaacctctttgagcctcagtttccccatccgtcaagtagctcatagcgagagtacccaacctcacagagttgtgggaggattctgatctgagttagtgtttgtcaagtgcagtgccggccttaaagtaggctaggccaggcgcggtggcctgtaattacagcagtttgggaggccgaggcaggagaatcacttgaggccaggagtttgagaccagcttgggcatcgtaaggagacctcatctctactaaaaataacaaaaattagccaggtgtggtggcgtgcgtctgtaaccccagctacttgggaggctgaggcaggaggattgctggagacatcgaggctgcagtgagccttgattgcaccacagcactccagcctgggcaacagagcaagaccctgtttcaaataaataaaaataaacgagagctgggcgcggtggcttatgcctgtaatcccagtactttgggaggccaaggcaggcggatcacttgaggtcaggaatttaagaccagcctggccaacatggtgaaacctcatctctactaaaaaaaaaaaaaaaaaaatacaaatattaggggctgggcacggtggctcacacctgtaatctcagcactttgggaggccgaggtgggcagatcacctgaggtcgggagttcgagactagcctggccaacgtgaagaaaccctgtctctactaaaaaatacaaaattagccaggcgtggtgacgcatgcctgtaatcccagttactctggaagctgaggcaggagaattgcttgaacccggaaggcggaggttgcagtgagccgagatcacgccactgcactccagcctgggcaaaaagagcgaaactctgtctcaaataaataaataaatatacaaaaattagccgagcatggtggtgcacacctgtaatcccaactacttgggaggctgaggcaggagaatcgcttgaacccaggaggtggaggttgcagtgagccgagatcgcgccactgcactccagcctagacgatggagtgagactctgtctcaaaaaaaaaaaaaaaaaaattaaaaaataaatgaggctgggcacagtgtctgatgcctgtaatcccagccctttgggaggctgaggcaggaggattccttgagctcaggagttcaaggccagcctaggcaacatagagatcccaactctacaaaaaatttttttgaaaattagctggccacaaaaaaaaaaaaaaaaaaaaaaagaaaaagaaaaaaagaaaaaagaaaaaaaaattagctgaccatgggggcacatacatgtagtcttagctactccggaggctgaggcagggggattgcttgagcctgggagagagagaggcttcagtaggttatgactgtgccactgcactccagcctaggtgacagggcaagactttatctctaaataaagaaagttaaagtgggttggatccctttgtgaaatacccaggttttgctggtgttggaatcccagcaattccaccttactcaatttgctgaacttctctgagcccccactgcctcgtgggaacaaaagtagctgcctcaagagctgccacgtggatgaatgaggatgaagtgcattagttaggaagggctgggttatgcttagtaacaagcactcccaaagacttcacggccccaacagctaaggtttggttcccatgatggttgttttgtgaagtgaaaatgcagcaaattatgtactgttttgtaatacttctccttggaagggacacatgccacctctgctcacatttcattggccaaagcaagtcacatggccacccccaatgtcagtagggtgggaaatatgattgtcctctaggatcagaaccatctgggcctggtggctggcgcccgtagtccgagctactttggaggctgaggtgggaggattgcttgagtccaggagttggaggctgcaatgagctatcatcacgccacttcactccagcttgggtgacagagcaagaccctgtcaaaaacaagacaaaacaggctgggcgtggtggctcacgcctgtaatcccagcactttgggaggccgaagcgagcagatggcctcaggtcgggaattcaaggccagcctggccagcacagtgaaactccgtctctactaaaaataacaaaaattagatgggcgtggtggcaggtgtctgtaatcccagctactcaggaagctgaggcagaataatcgcttgaacccgggaggcggagattgcagtgagccaaggtcatgccattgcactccagcctgggcaacagagcaagactctgtctcaaaaaaaaaaaaaaaaaaaaagacaaaacagccaggcatggtggctcatgcctgtaatcctagcactttgagaggccaaggcgggtggatcacctgaggtcgggagttcaagaccagcctgaccaacatggagaaaccctgtctctagtaaaaatacaaaaaattagccaggcatggtggcggatgcctgtaatcccatctactcaggaggctgaggcaggagaatcgcttgaacccagaggcagaggttgtagggagctgagatcgcaccactgcactccagcctggacaacaagagtgaaactccgtctcaaaacagaacaaaacaaaacaaaacaaaacaaataatacatgatatgtcagtggttaacaacatgtctggtatacagcaggtgctcaataaatgggcatcattataggagaggcttacaggataaaatggctgacactccaaaccatcatgcttcatgaatggggaaactgaggctcttggctctacccttgcctgcccctccccctgcttctcatgggggaaaaaaaaaagacagcagccatttctgaagaagcatttattagcatgcagggcccatgctagaggctccttatttccagggcaaggccagcgagacagagcccattgctcaggacgcagcccagattgcaaagagaggacagcccatggtagcggaagaaattctggcggagagcactgtacttggggtccttctctcgcagctggcggtagggatcgggaccctggtggctgcctggtacctccccacccaggcctcgctccttctccacggtttgcagggcccacatggcagctgtggtgcggggttccagccagcgggcgttgacagtggccagcgtaaggctcaggaacagcaggtaaagctggcagggagagcagaggagaaggtgagccatgcctgggaggccagaggggccctagggagggtctttctgcatcctcaacagcacaggggtgggggtggggacagcactggatcaaaaaacctgcctccccctctttccttgaacccagactgagggacccaaagcagaactccagctcttctactctgaaactggcagctctgaaggaaaggctccatccccacctcctctatccccccgcaaaacctcccgagcctcttctcctctgatactcagactggaagtccccagagcaggatctctttcctcagtggccacagcccagacgcctgaagctgacattggacccacagagggtgaataaaaagtctttgagtggctgggcgcagtggctcatgcctatagtcccagcactttgggaggctgaggtgagtggatcacttgaggccaggagttcaaggacagcctgggcaacatgggcaaaaccccgtctctactaaaaatacaaaaattagccaggtgtgggggctgtccccctgtaatcccagctactcaggaggctgaggcatgaggattgcttgaacccgggaaggagaggttgcagtgagccaagattgcaccactgcactgcagcctgggcgacagagcaagaccctgtctcaaaaacaaacaaaacaaaacaaaaagtctttgaaggcaggcatggtggctcatgcctgtaatctgtaatcccggtgctttcagagatgggggtgggagcatcacttgaagccaggagttcaagaccagcctgaacaacacagcaaagaccctcatctttttttttttttttttttttgagactgagtttcactcttgttgcccaggctggagtgcaatggcgtgaccttggcccactgcaatctccgcctcctgggttcaagcaattctcctgcctcagcctcccaaatagctgggattacaggcgcacaccaccacacccagctaatttttgtatttttagtagagacggggtttcaccatgttagccaggatggtctcgcgctcctgacctcgtgatccacccacctcagcctcccaaagtgctgggattacaggcatgagccactgcgcccagcctattttttttaattaggaaaaatgtttttgccattctcacattgctataacaccatctctatctgttttaagtatttgaataccttctgagcctgtttcattaaaataaataaataaaaggaaaaaaaaacagtctgtgaagttctagttacccataatcccctcctgtctgtgagattattcttgaaacacctgtcaggtctcacttacccacgtctatgaaacataatgcaggcaagggaaggccagagtaaatagagaaatctgagatgcagagatagtttcttgccttgtggccagaaaaatgtgtggaaggggataggaaaccataaattcccagtcgggctggtttttaaacaataagctggggtcaatgtgccagctcagctgagtcaccacagcttggcagcaggcccagccagcgggaggagagggaacagcagctagcagggagatgctgggggatagacagggctgctggggactgttgtacaggctgtgcactgctcaagggtatccagagcccagctttgtatctaccaggaagaaggggctcccctcccctcccttcctcttccctcccctctcctttcctctcctctcctttcctttcctttttttttttttttttgagatggagtcttgctttgtcgccctggctggagtgcaatggcatgatctcggctcactgcaacctctgcctcctcggttcaagcaattctcctgcctcagcctcctgagtagctggaattacaggtgcacaccaccacgcctggctaatttttttgtatttttagtagagacggggtttcaccatgttggtcaggctggtcttgaactcctgacctcgtgatccgcccacctcggcctcccaaagtgttgggattacaggcgtgagccaccatgcctagcctttttttttccccccctggaaaaggtgtagccataggcgctgactgaggtcctgggaacaagtctccagagggcagtggcactcaaacccacgtacctggctggcctcccagaatgtgagctgagcccaagcatgctgtgaagccaagatgcagaggttgatgaaggcacagcccatggagatgtggaagtagaaggggaagagtttgctctgcactagtccgaaggtatgtcggggaaggcttcggaaaagcaggaagcctgcagggtatggggaccacaggggtgttagggcacttcccggttcccctcttatttccatccccaccccaggtacccatgacatccaagctgagggtccctacctgagacgaaggtcacccacatttgcatgccccaggcacctgacaagaccagtagatggaccatcttaatcaggcctcctaggttcccgccttcctccatcttgcagtcctgggaaggaggcaccgggtggctcagaactttacctttgcctcatgcgtggccttcagaccctgtgagcccgctcggggacagggttacggccaatccagcagagattctggcaaagcatcccgggaatgagagtgagaaaggcccaaagcagtcaaggcccaaagacaaccctcgaccccatctctccaaatgtcagccctcaagatctcaggctctctggacctcaatctccatgccacttcagaggccccaaatttcagccacagcagctccagatcatagccctaggtcttcagagatcactccactaattcccaaatatcaccccagggatccagttctgacagccaagaccactcctctcataaaataataccggatattaggtgaagatcccgaaagccccgaggaaaccctaaatctcatcctgaggacaccgatcccaccaaagccccgaggaaacgccaaatctcatcccgaggacaccgatcccaccgttaggaaccgggacctcaatccgcagcacccggattccgagaacagaggcgtcggggccaaatgggctgaatctggtacctcactcccacgcccccgggtggacagcgaccctcctcggccgcgtcccctcgtgggtttcccccaaccaataattcgtcccgcctcccagctgagcccgaagccaatcgggtcgtagatctgcacctttctatcccgccctcctgggtattgactaatcgtagaaacccccctgggatcccgccccctccacgggcttttatccaattacgccgcggctactaagcgcagctgaagcgtgaaggcgccaatgaggccttcggctactccggcaggggcggaactaaaatgccggccacacccctctctgtgactcagtctctgagcgttttaatacgatggtgtccccgcgggatcaaacttcagcgtcacagctgaggactggcttcgtggtccctgatgggagagcatgaacaggtggtatgtggtaggtggggttctggagcctggcgggtgtagatttcacaacccagggggcggagccaggatgatgaccccgccccctccctaaataattctcccgggagggacacggaagcagcaaccgggatgggacggggagagaggaggcactactggggacctaagctggttctcaaatgcctctccttttcccctccaagcctcccaggcttcctatggtccctaagtcccgggttctcagcgtgacattccagagcaaacacagctccccattactctataccaggcactggcatggattaatttatctaatcacaacatcccagtaaggtgactattatgacatctcgtttttatagttggggacactgaggcatggagaggttcagtaacgcgaccagtattacacagctggaagggacagagctaggatttgaacccaggccatctagctggagagtttccctgcttaaccgtcatactctgctgtccctggaagtgaggacctccctgaggcagtgactctcggaggggcagcttaggacatttcaggcagaagaaaaacgtgtacatcacagggtgggtgtgaagatccagtgaatgcttaggggatgcccggcactcaattaggtgctcagaaaataggagcctaaaaaaggattaaggaagattttactgaagatatgctgaatagtttttgtttgtctgtttgtgtttgagacggagtttcgctctcgttgcccgggctggagcacagtggcatgatatcggctcactgcaacctccgcctctgaggttcaagcgactctcctgcctcacccttccaagtagctgagattacaggcatgcgccaccacgcctggctaattttgtatttttagtagagatggggtttctccatgttggccaggctggtctcgaactcctgacctcaggtgatccacctgccttggcctcccaaagtgctaggattacaggtgttagccaccgtgcccagcctgagtagttctgaagagcgtgtaggagtcttccaggtcgactgaatcaggcagagggcctggcaagggtgacagagagaaaggtctagaggatttgggggaagaggctgagtgtgactcagggcaaggtgcctttcacctagaagtttctccaggcagacctgccccagatatctccatctgtgccatatgtggctatactggagggggaggggagttgaatgtgagacccagagctcagctgtttcctgtttccagcctcttctagcacgggtctgggccccaattcagctaacatttattgaacagatatgccctgcctctcctgctcacactctatggctggcattcacctgtggggccaggtcgaaactcctggcttggccgtcaatgccttactggagctgctctgctaacctcctgctgcttcctctcggacctcgattcagccatcatgaatttaccagcatagagcatgtgattccacacctccaagcttttgcacatgctgctccctgccaggaaaggccttcctttaagccaatgtcaaggtcccttttttctttggactcttctgaggcctgattttttttctttggggccttctgggtccttctcactgcccagcccaaaccttggggctgggataatcttttttgttgttgttttttatttttggagactgagtctcactctgttgctgaggctggagtgcagtggtgcaatctcggctcactgccacctccgcctcccgggttcaagtgattctcctgcctcagcctcccgagtagctgggattacaggcgcccaccaccatgcccagctagtttttgtatttttagtagagacggggtttcaccatattggccacgctggtctcgaactcctgacctcaagtgatcctcccgccttggcctcccaaagtgctaggattacaggcgtgagccaccattgctggccgcgtctggccttgggatcatcttttatccagctttggctcctaccataactgagaagccttgagtttagggctgaggcctctctggcatgtcagggagggtctgggggcactggggacatggggacttatctcaaagcagcccctgcttccctactcacagcgaccctcttttggccggcctaccccgggaccctgactactctgtgtcctgcctctactcacctccctcaccctccagcatgtgtttgcctgctaacatgaagtgtgacaagtactggggttagttagggggctcccatagggctggggacactgggaggggctgggaatgtgaggagtgccctgcactgtccctcaaggaagccctcacccctaggctcttcctcggacaaggctctggagcgtacagctcactggtccaggactccagagccagagaccttgggatgccctgcttctggggacacagtgaggactgcagactgcaggccagggtggggctcagggccttcgccacatgaggctgccccctcccccagtccagacctgcagaagcagtgctgtaatgaccaggacattttgaagaggcatcacaacgtagctaaggtcacccccacccgggaaaccccttcaatgcagaaaaccactgcaatctactgctgtggggcttagggaaggggctgtaaggcagagagactcccatgaatgcacccactgtgtttcttcagcacctagaacagcacctggcactcagcaggccctggctaagcaagtcttaaatgaatggatgaaggaatgaatggaaggaaagagtgtggttgtgtgtcttccatggggatttggctgtgatcgtctctcagccacataagtgcacttctgagcatatgtagcccaagggggaggtgcatgaatatgcctggagtgcagctttgcctgcacttacggtttgggacacctagaactgaggagatccaactcttgtccagccctcaaaactgggttgaggtgagcaaggaggcagctcagggacaaatttctactcccatctcatctctcttccttagaagcccttggagaccagctcttccaaagtcaaaggtgagaaatctcctttccaacaaaactgtgtggggaagacctgctggtttctacctctaccctctgccccagcatcagctgtccccctgccatggtcacccattcactcctgcccaaggctgagtgggcccctgttctatatcttatcccctgtccctactgctactctgagcctttgctgacctctgccctgcccttgccccagaccccaccccttacagccctggctcaccctcttctctgcccacagccaagaccattgtgatgattcccgactcccagaagctcctgcgatgtgaacttgagtcactcaagagccagttacaggcccagaccaaggtgaaccaccttggccctgcccccagcaacctctgtttctccttgccctcccctccttcctcccaccccaaggctgacctctttcccccaggctttcgagttcctgaaccactcagtgaccatgttggagaaggagagctgcttgcagcaaatcaagattcagcagcttgaaggtgaggactgaccagagatcaaggtcaggctaggccaggcgtggtggctcacgcctgtaatcccagcatttggggaggccaaagaggttggatcacttgaggtcaggagtttgagaccagcctggacaacatggtgaaaccccatatctacttaaaaaaaaaaaaaaaaaaagccaggtgctgtcactcatggctgtaatcccagcactttgggaggctgaggcaggtggatcacctgaggtcaggagttcgagaccagcctggccaatatggtgaaaccccatctctactaacaatacaaaaattagccaggcgtggtggtatgcacctgtagtcccagccactcaggaggctgagaaaggagaattgctttctgggaggcagaggttgcagtgagccgagatcacgccactgcactccagcctgggcaacaaagcaagacttcatctcaaaagaaaaaaagtcaggctggaagctggtcctgttgggatcagctgggccaggccagggtgagggaaattgggagagtctgggttctgggtcaagattaggacaagctgggttcagggtgggatcagggctcagtcaaggtcccacactctctgcagaggtgctgagccccacaggccgccagggagagaaggaggagcacaagtggggcatggagcagggccggcaggagctgtatggggccctgacccaaggccttcaggggctggagaagaccctgcgtgacagtgaggagatgcagcgggcccgcaccactcgctgcctgcagctgctggcccaggagatccgggacaggtcggggatggcgggagggcagcttggagtccacaggagggaagggagacccagaactggggaatggaggcaggatgggggaaatggcagatgcctgggggagggggactgagggatggtggaaagcctgagggacaagaagagggaatgaggccgggtgtggtggctcatgcctgtaatcccagcactttgggaagccgagatgggcggatcacctgaggtcaggagttcgagaccagcctggccaacatggtgaaaccccatctctactaaaaatacaagaattagtcaggcatggcggcgggtgcctgtaatcccagctactagggaagctgaagcaggagaatcactggaacccaggaggcagaggttgcagtgagctgagatcgcaccactgcactccagcctgggcgcctgggcgcctgggcggcagagcgagactctgtctaaaaaaaaaaaaatgaggaggggatgagaggctcaggggagacaggtggctggtgggggcgggggagtgggaaactgagaggccagaaggcagggaagacagaaagctggaggtgggatggaaaaggaggccaggggatcagaaagggggatggcagggaagactgagaggacaggagactgggggtatagaaagtcgggggacaggaggtggggaggtggaggccaggtgataggaggctgagtggggtgggagagactgagagaatgggaggctggggatcagaaggagaggagggggatgagggtagggggattgtagaaggggaggggaaaagggcagggaagtgtggggaggggacagagcttgcggggatgggtggaggcacagataggggcatgggaggtcaggggccaggcagggagtgcaggtctaggctgcactgtcccctcagcaagaagttcctgtgggaggagctggaactggtgcgggaggaggtgaccttcatctatcagaagctccgtgagttcctggagcccacagccggtgtgtggggagggggtccttcttcagcctttgtccgcctgagccccctccctccacagaagcgcaggaggatgagatctcagagaacttggtgaacattcagaaaatgcagaaaacgcaggtgaaatgccgcaaagtgagtggaggagatggggaccctggggaggagtgggagagggagggatggggattttggccagcctccaccatgagattggagcctgggttcaaatctcagctctgccactcactgctgtgtgactgtgggcaagtcacttgacctctctgagcctcagtttcctcatctgtataatggatgtaataataactcatcttggctgggcgcggtggctcacgcctgtaatcccagcactttgggaggctgaggtgggtggatcagaagttcgagaccagcctggccaacatgatgaaaccccgtctatactaaaaatacaaaaattagctgggtgtggtggcaggcacctgtaatcccagctactcaggagactgaggatggagaatggcttgaacctaggaggcagaggttacagcgagccgaaatcgtgccattgcactccaccctgggcgacaagagcaaaactcccatcttaaaaaaaaaaaagaaaaaagaaaaagaaaaagaaaactcatcctgttgggtgctgtggcatgcctgttatctcagcactttgggaggctgaggtggttggattgcttgaggccagaagttcaagaccagcctaggcaacatggcaaaaccctgtctctacaaaaaacaaaaaaaacaagagggtgtggtggcacatgcctgtagacttagctactcagaaggctgaggtagggggatcacttgagccttggaggttcagggtgcgttgagccctgatagtaccattgcactctagcctgggcgacagactgagaccctgtctcaaaaaagaaacaaacaccaaaaacaaaaacaaaaaacaaaacaaaaaaaaacactcctccctacctgatcaggtgtctgtattagctgagtactgtgcacttgaatgcagtctggcatataacaagtgctatataacagtcaccttttactattatcattattattatttattttgttttcttttttgagacggagtttccctcttgttgcccaggctggagtgcaatggcgcgatctcaactcactgcaacctctgcctcctgggttcaagcaattctcctgcctcagcctctcgagtagctgggacaacaggcgcccgccaccacgcccggctaactttttgtatttttagtagagatgcggtttcactgtgttagccaggatggtctcaatctcctgacctcgtgatctgcccgcctcggcctcccaaagtgctgggattacaggtgtgagccaccgcgcctggcactattgtcattattattatgactgctgttctctcatccctccccaccccagatcctgaccaagatgaagcagcagggtcatgagacagccgcctgtccggagactgaagagataccgcagggagccagtggctgctggaaggatgacctccagaaggaactgagtgatatatggtgatgcccagcctgcagtctgacccctgaccctcctctgaacccgttcccccaacgggatctggcagtgaccaccagaacctggagcccacctgagtccagacttccctcaccccctaggactcaccccaccacggcccccaaccttagctgtactgctgtctacaccctgagcagtgtggagtctcccagcgcccccagctccttgtcttcttgcaggtctgctgtgcacgtgctgcagaactccatagacagcctcactttgtgctcgggggcctgtcccaaggcctcgagcctaagaggtgagggaggctgagaattgctcaggggtgggaggtcattgtctagcttcacagggaggctatgttcagagagcctatttgggagtcacatctgatgggtgttattctatggtcacattaagtagtgttctggggtcacattaaggagtcactggaggtttcatccaggagtcattcatggtcacattcagagtcacttggatcttatatgagtccatggggactccacacagtggctcatgcctgtaatcctaatattttgggaggctgaggtgggaggattacttgagtctaggagtttgagaccagcctgggcaacacagtgagaccccatctctccaaaaaatttaaaaactagctgggtgatggtgcacctgtggctgagcacacctgtagtctcagctactcaggaggctgagacaggaggatcgcttgagcctgcgaggttgaggctgcagtgagccataatcgtgccactgcactccagtctgggcaacagagcgagaccccatctctaaaaaaaaaagtgtcaattgggtaaaatgcaagggtcattgaagtcataatttggtgtcacactggatcacattcaagggaattgggggtcatggtttaagtatcaatgaggtatactatgaagggacacagggcctatatttgggggttacttgagggtcacattcagggaacctgtccctcctgcaggccacaaggggcaccagtgcctgagccctccactcccctcctgggactctgactccgactgtgaccaggacctctcccagccacctttcagcaagagcggccgctccttcccacccggtgcagatcctccccagtccccccctccacccatttccctcctgacctgcccttgactcccacagtctagaccctcagaacaggcccagatcctgatctgggcatgcggtccctgacctgcagccccggagtcccctggacctggccaggccctgacccaccctctctctccacagcttgagcagccgggactgctctccctgaagacccctccagagagaaaataaactagcccagaccctcctctagccccgactgttagtcttgctgcttcctgtgcctaggaatccccctgccctcctagtttacccctcattgttgggggggaggggtgtagagaccccaggggtcattcgggatgtgtgggcttggaatcaggggacatctgaagccagatttaatatatgacaaggcaaggagtcattctgtccagacacgagcagccagacagacttccacactggccacagagccttcctttctggggggccctggcgaatggggaaactgaggcccagagagggagaggcgcggcccagggacatactctgaagcccctccctcctattaccctcggagccccgcccaccccagggtcctccctctctacttccattcttggttccttcctacaatcgatgctaacacgccccgcctccaagatcacggaggccccgccccacggggctatgcaaatgagacgcccggaggccccgcccctccctccacctcggagtctgcgcggcgcggccaggcccggccgaccgcgtctcggtcttcgcgtctgccagcctggctggcagtccgtctgtccatcccgccgcgccggggcagtctaggcggagcgggggctcaggcggcggcggcctcgacgcggtgagaggagggggtgggggcgcccctcatcccctcccgtgggcttcccacccccggtgtcggtctccggttcctgagggttgggtccctctgggtccagcgcggggaggggcgggggaggggaggcggcgagctgggggaggggaccgggctgggggaggggaccccgggccgaggagccagcaccggtggtgagggcggctgtgggtaactgtgattgtgtggttgtcattgtgtgtctgtgtgtggttgtgtaactgtcatcgtgtggctgcatgactgggattgtgtggtttcgggaggtccgcgggtgtgtgtgtgtgtgtgtcactgtcattgtgcggctgtcgttgtgggtgtcactctgatggtttgtgtgtgtgtgtctggctatgctgtgactgccattggccccccgtgtggctgctgtctctgtgtgtgactgtcttggtgttcgtgtggttgtgtgcataggactgtcattgtgtggctcctgttgtgtgttcattctgatggtgtgtatgtgtgtgtggctgtggtcgtgcgctgtgcacctttcttgtgtggcattgtgagtctgtgtcatggtccatggatgtggccatgtggttgtagatggcaccttgtctctcccctgtgactgttggtgtgaataagagactgttagtgtgtgtgtggctgtcgctgagtgccttgtaattgggggtgtgacgctgtgatgagttctgtgacccccattgtgtgcggtgactcttttctgtgactcttaagtgtgttgcaggcctgactgtgtgtccctgactgtagcggtgtgggggcttgtgtgggactgtgatgtgtgtagggtctcctgacatgtctctctctgtttggcctggggtgggggtggggacttgtttgatctgtttggtgtctctgacaggctatgagcccactgtgtgtgagtatgcagtgacatgtgttgtgtgtgttggacacctgtctgaacaagggggcccctcttgtttactgcaaagtggcgcccagcacagcgcctggaagtcggcaggtgctcggtcttcactgtgggatgggtgaacgctatgccatggttgtgtgtgtgtgtgtgtgtgtgtgtgtgtggtgccaggatggaggctgcggctgggttgtgcttcctaagggtgacagcatgggtgactctgggtatctaggacctctggcaaccatcaccccatatcacactgcagagtgagtgtcgtggttggggtgctggacccagagtgcctaccctcgcctgcctgggcctcagtttccacatctgcacaatgggggtgaccatccctgccctgctggctgccaggagcggctgtgagtcttcaggcgtggatgcagcctgggggaagccatagggcgctttcacaggtgagatggggctgggagaatggatgcaagcaggtgtgactgtgttgagccctaaagcgctggggactgggggtagccttgggggagggaagaggagaactgggaggcagaccggctgggaagagggggaaggagggagaggcagttggcagagaaggagggcttggctatcagcccaaccagacaccaacaccacagcccatggggacagagagaggggcccctgcagaggccatggaggaagcgactcaggggaagggtctggtagggatgggggccccttgggaaagaggatggtgtcccctaaaaactagtggggacccttctaagtgccatgggggaggggttcccatgaggctggggagtctcttctaaaggcccacctcctaaagggcattgggtcagagcctcccatgtaggctgtaaaggaagggacccccgtagactcttggggagtggtgtcagaggaggcaggtgtccccagtagggtcaggaccaacagggcaggacctggattgcagaggcatggccagaaggttcaagggacagagtcagggcctccccgggtcttcagggccaggggtgtggccaaaggactcaggggatgaagccagggtcccggtgacctgagccttcccctaggcacaccccctgggactcccactccctccccacctctgcaggcctggccttcaccatggcgggagggagaccgcatctgaagaggagtttctccatcatcccctgctttgtcttcgtggaggtgaggacccccgtacctctcccagagacggcgtgcctatctctgtctctgtccaacctcagtctccttatctgtacccacttttccatctctgggatctcccttgctgtcccctttctcttgagaaatggttatgagcttagattcagaagtgccactccccggggtccaatccctctctgccccatccacactgcagggtgctggacaccacaggtaccctcctgagccacagtttcctcattcataaaatggacatcaccagagtcccaactcatagggctgttctctgtgtgtgtgtgtgtgtgtgtgtgtgtgtgtgtacgtgtgtttgagatagggtctcactctgtcacccaggctggagtgcagtggcataatctcggtttactgccacctccacctcctgggctcaagcaattctcctacctcagcgtcccgagtagctgagactacaggtgtgtgccatcatgcccagctaatttttgtactttttggtagaggtgggatttcaacatgttggccaggatggtctggaactcctgacctcaagcaatcctcctgcctcagcctcccaaagtgctgggattacaggcgtgagccaccacgcccggcctcctagggctgttctaaaggtaaaatatattaattcatggacaaagcttggtacgaccccctgcccacagtgagggttacacctgtggtagctgctagcacccctacttctctgatttctttccatgtgggagagtctctccacctccccctgtctgtctgtctctcatttgagccttggccctaatctcactctccccatgcccatctcttctctccctctctctacaactcccttcccttttcctttcccttctctttcctcttgctttctcctcttctcccctcctttcctggctttcctctctctctgttttttttttttcacttcttccttttctttctttccctccctccctctctctctttctttcttttgtgatggagtcttgctccgctgcccaggctggagtgcagtggcacgatcttggctcactgcaaactccgcctcccgggttcaagtgattctcctgcctcagcctcccgagtagttgggagtacaggcgtctgccaccatacccagctaatttttgtatttttagtagagacagggttttgtcatgttgtccaggctggtctcaaactcctgatctcaggtaatccacctgcctcagcctcccaaagtgctgggattacaagcatgagccacgttttaattttttttctttctttttgtctttcagccattccttttcctttcttttttttctgagacagggtctccctctgtcacccaggctggagtgcagtggtgccatcatggctcactgcagccttaatcctctgggtgaagcaatcttccttcctcagcctcccaagtagctgggactatagttgtacagagataaggtcatgcgatctcaaactcctgagctcaagggatcctcttgcctatgcctcccaaagtgctggaattacaggcacgagccgctgcacacggcccctctgtttctgtctccttctccttctgtttctcctaagccctgacccttctctcacctcctttccccatttctctcagtctctctcccccttgtctctgtctctctccatcttctagtttctgtctctaacccatgtttctccatctctgtatctctgcctctgtggcctcagctggagtcctgacctctctcttctctctccgccacctctccccgccctggcttggtggcagtcggtgctgctgggcattgtgatcctgcttgcttaccgcctggagttcacggacaccttccctgtgcacacccagggattcttctgctatgacagtacctacgccaagccctacccagggcctgaggctgccagccgagtgcctcctgctcttgtctacgcactggtcactgccgggcccaccctcacggtgagacaatgaagacctcctaggaggcaggtgggccggtaagggtgggtgaggggatgggctggaaggccagaagactccatcttggtcttgcccacagatcctgctgggagagctggcgcgtgcctttttccctgcaccaccttcagccgtcccagtcatcggggagagcaccatcgtgtctggggcctgctgccgcttcagccccccagtgcggaggctggtccgcttcctgggtgagagacatggcctggggtcagccccatggtaatggtggggaggtgggtatagaagaaaagagtcatgggcctgacagtcataataattccaggctgggtgtggtggctcacgcctgtaatctcagcactgtgggaggccaagtgggcgatcacctgaggtcaggagttcaggaccagcctggccaacatggcgaaaccctgtctgtactaaaaacaaaaaattagctgggcgtgtggcaggtgcctgtaatccttgaacccgggaggcagaggttgcagtgagccaagattgtgccagcctgggcaacaagagcaaaactccgtctcaaaaaaaaaaaaaaaaagaagaattccagggaaaagctgggcatggtggtacatgcctgtagccccagctacttgggaggctgaggcagagactcagctacttgggattactagctacttgggagactgaacaagatcccacctctttaaaaaaaagggaattccaggggggaaggaagaggacctggaattgccatgatggggatgttaggaagcaacaagggacttaggctcagaccagatgtaatggaggttctagggacatgggtggggcctaacccaaccatgatggcaactgtcggaagagggtcccagaatgccataaggagagtctcaggcacaaaagagagacacaggcacaggacaaacaccctggggcccctgggtgagactctggctgtgctttaaatggggtcccagcctcaagtagtggctgtgggaaagggggaggggcagaccttacctataatgatggtcccagggcagagggcgggagacccagctctaacttattagtggccccaggaggagagtgttgaactcagtagtagccagtttaggggcaggcaggaagagccccaggtatgccattagggttttccctagccgtcctaggcatggggtggatcctgatgtaatggtgttggggcgggggtccaagcccagctataatggggctccaagggaggatccgcccctgacatagtggtaatcctagaaagacaggggccagataatgagggtccctgggggcaggaggcctcagagtaccttcatggtggtcttaaaggaagggggatgttggcacaactacagggtcccaagtgtgctttaatgacagtcacaggaaaagggagctaagaggcccaatggaatcagtgggagcatcagggcctggcgcatgaaccccttccactatcccacccctaggggtctactccttcggcctcttcaccacgaccatcttcgccaacgcggggcaggtggtgaccggcaatcccacgccacacttcctgtccgtgtgccgccccaactacacggccctgggctgcctgccaccttctccggatcggccaggtcccgaccgctttgtcactgaccagggtgcctgcgctggcagtcccagcctcgtggccgccgcgcgccgcgccttcccctgcaaggatgcggccctctgcgcctacgcggtcacctacacagcggtgagcttcgggagcttcggggtcggaaatgggtgtgcaggctggacagcgaccagcagctaggaagccgccagggttggagcctctgctcttccacgccccgggtgctgttggaagctctcgctccacgccccgacctgttggaagctctccctcctcctcccagatcctagccacgcccccagtcagaggctatcgctgtccattgactccgccccttgccctctggccacgcctcctgagccagtaatgcgagggaaactgttggctctaccctatggcatcaggacagtccctgatgtgcaagactcggaacccctatagcctagccaggcccccaggatgctacaggcgctagatattagctggcagactgggcagatgggacggccccctggagtccttgcccctcttctggagcccttgcccctctcctgggggccttgttccctcctgttgtagccctggccacgccccttgctcttaactgctctgggatttctaactctgtcccctgctttttcctggtcacatcccctgttgcttcaactcttttttctggcatccgggtttatgctcccaccctgtcagtggtcccctaggggtcaggggctccacctcctacagctcctacagctcctacagctcccttcgccctgactccaccctctggttctgtggccacgccctaatccagtaagtgtctgtccccatctgcgactccggaccagggacacctgggccccagaccttgtcctctgctcttgggagctctggccacacctagccctgcaggtggtgcccacgagactccaagacctcaatccctgacccccccccctttgcctttttggtcacgctccctggaaaagcccactgggagcccatgactccaaccctggagcccctggccactccctccagccccaacgctctggccatgcgctctagcccagaaaggagcgtccacttgggttcggcgacttgcctccgctatccccctgaccagtccggctccccgcagatgtacgtgactctcgtgttccgcgtgaagggctcccgcctggtcaaaccctcgctctgcctggccttgctgtgcccggccttcctggtgggcgtggtccgcgtggccgagtaccgaaaccactggtcggacgtgctggctggcttcctgacaggggcggccatcgccacctttttggtgagttgcctcctcaaccttcccagcatggaagaccctcaccagctctctgacccaagaggcaggaccacatgatggagaagggtgtggactctgtgtgaccttgggccaatcccttaacattacccttcctggatattctcatctgtgaaatgagataccaggatcagggtgaggcaaggccttgaatgcaaattttaagagggtgcccaacactcagtaatcaagattaatattttaacaaaacatttttaaaaatcaaagttaatacaaaactatcataatgtacagaatataaaaattctaaataaagatgaatcaaggctgggtgcggtggctcacgcctgtaatcccagcactttgggaagctgaggcaggcggatcacttgaggccaagagttcgagaccagcctggtcaacatggccaaaccctgtccctgctaaaaatacaaaaattagccaggcatagtagtcccagctacttgggaggctgaggcagaagaatcgcttgaacccgggggacggaggttgcagtgaactgagatcgtgccacctcactccagcctgggtgaaagagcgaaagtctgtctcaaaaaaaaaaaaaaaaaaaattagctgggaatggtggtgcacacctgtggtcccagctactcaggaggctgaggcaagagagttgcttgaatccaggaggtggagtttgcagtgagctgagattgcaccactgcactccagcctgggtgacagagtgagactgtctcaaaaaaataaaaaattaaaaaaattaaatcctgccactgtacaacttggtcttacttactttagcctagtgtggggtctgtgggataaataataattgcacctacctcagtaaaatggaaccaacagtgcctggcacatactatgcattagctgtttttgaaaaccggagcctcactttccttatctgaaaaatggggatggtatttacatggctcctatgtgacttgccccaggcctcaacactctcctctccctctattccaggtcacctgcgttgtgcataactttcagagccggccaccctctggccgaaggctctctccctgggaggacctgggccaagcccccaccatggatagccccctcgaaaagttaagtgtggcgcaggtaaggggggccgggggctgctcccggctggagagggtggtgggtggagggggccaaggagacaggaaggaagtcaggcaagaggtgggggtctcagaaccatggggaagtggagggatcacccatctctgtggacataggtcctgggcggacagccccaaagaatgaaagggagcacccccgtcttcttcccagggggacacggttaatcatgagaactgtggttgtcttttccatggggctcttcacctgatgagctccttgtggctgtggccggtagggcccagggggccactagccccttccgtctgtctctttgtctcaggaacccgaggtctgcaggccgcattcgacaccggcacggctcaccccatccagtgagtgttgggggagtggggggctaaacagggggacttccaggtgggcagccactgccccagaggtctcacctaggcctttatgctgcctcccgagttttctgatcccctgatatctggcttctgaccaccagagtcgcagaactgcgcccgccgtggccacctgatccccagctgtgtctcctccagggccccagccatgtgttcgtcgccccgtgtgccccgtcctcgattgaggtctgagccgacgcccttgcccctgcccctacccctgccagcgcccacccccagccagggcccctcgccttcctcccctggacctggggggccaggcgggggtggtggacgtggccggaagctgctgctgcccacgcccctgctgcgggacctgtacaccctgagtggactctatccctcccccttccaccgggacaacttcagcccttacctgtttgccagccgtgaccacctgctgtgaggcccgaccacccacccagaatctgcccagtccccacttcttccctgccacgcgtgtgtgtgcgtgtgccacgtgagtgccaaagtcccctgccccccaagccagccagacccagacattagaagatggctagaaggacatttaggagacatctgcctctctggccctctgagatatcccgatgggcacaaatggaaggtgcgcacttgcccctactattgcccttttaagggccaaagcttgaccccattggccattgcctggctaatgagaacccctggttctcagaattttaaccaaaaggagttggctccaaccaatgggagccttcccctcacttcttagaatcctcctgcaagagggcaactccagccagtgttcagcgactgaacagccaataggagcccttggtttccagaatttctagagtgggtgggcatgattccagtcaatgggggaccgcccgtgtctaagcatgtgcaaaggagaggagggagatgaggtcattgtttgtcattgagtcttctctcagaatcagcgagcccagctgtagggtggggggcaggctcccccatggcagggtccttggggtaccccttttcctctcagcccctccctgtgtgcggcctctccacctctcacccactctctcctaatcccctacttaagtagggcttgccccacttcagaggttttggggttcagggtgctgtgtctccccttgcctgtgcccaggtcatcccaaacccttctgttatttattagggctgtgggaagggtttttcttctttttcttggaacctgcccctgttcttcacactgccccccatgcctcagcctcatacagatgtgccatcatggggggcatgggtggagcagaggggctccctcaccccgggcaggcaaaggcagtgggtagaggaggcactgcccccctttcctgccccctcctcatctttaataaagacctggcttctcatctttaataaagacctgtttgtaacagaagtttggccatctgccttcctcccccgggtggtgggggggtgcggaggacattcatcgtgggtctagatgtctgtggagctgggtgtgggtgtgttgccgcagtgtatctaaggacaattgtggaaaggcagcccggtttcatggagcttcagacttgggctgaaatcctggctcagcattctgggctctgtggcctcagaaaagttcattcacctctctgtgcccttgtttcttcatctatcaaaggcaaacagtcactcaagctaccaaggcacacaaacccacatcaggagccgtacatgccctgtgtgtctcaggccagggcacagagggcacaaggaatggggtgaggatacttgggggtcctgagagggatgggggatgctgaggggcactaagaacctccaagtggaacacctggctgtgtggatgagaacaggggtgctgagtatgagattacaccaagacccaacccccctgagaactcagcagatactggggatgttcaaagggtcagggagagggagccacaggacccctccctcaattgtggctctgagggctttcagacagggcatttgggacccagagtcactcaggaaccaggaaaagggagtctgtttcccttctctccttaattaattcactcattcattaagcaaacactgtagaacccctactgtgtgctagatggtcttagtctgttccagctgccgtgacaaaataccatggacaggatggcttatttattaaattattaaaaaataaatttctctactactattaaattcctctactaattattaaaaaataaatttcttggctgggcatcgtggctcacgcctgtaatcccagcactttgggaggccgacaagggtggatcacgaggtcaggagattgagaccatcctggctcacagggtgaaacctcgtctctactaaaaatacaaaaaattagctgggtgtggtggcgggcgcctgtagtcccagctactcaggagactgaggcaggggaatggtatgaacccgggaggtggagcttgcagtgagccgagatcgtgccactgcactccagcctgggggacatagcaagactctgtctcaaaaaaaaaataataataataataacaataaatttctgatttatttatttatttattttgagacggagtctcgctctgttacctgggctggagtgcagtggtgcgacctcggctcaccgcaacctccaccttccaggttcaagcgattctcctgcctcactcagcctcctgagtagctgggactacaggtgcgcaccaccacgcccagctaattttttgtatttttagtagagacggggtttcaccgtgttagccaggatggtctcgatctcctgaccttgtgatctgcctgcctcagcctcccaaagtgctgggattacaggcatgagccactgcgcctgccttatttttattgtgtgtgtgtgtctttttttgttaagatggagttttgctctgtcgccaggctggagtgcaatggcacgatctcggctcactgcaacctctgcctcctgggttcaagcgattctcctgcctcagcctcccaagtagctgggattacaggcacccaccaccacgcccggcaaatttttgtattttcagtagagatggggtttcaccgtattggccagggtggtctcgaactcctgaccttgtgatctgcctgcctcagcctcccaaagtgctgggattataggcatgagccgctatacctggcctatttttttaatagagacagggttgtgccatgttcctcgggctggtcttgaactcctgggctcaagtggttcacccaccccagcctcccaaagtgctgggattacagacatgagctaccacccctggcctaacagaagtttattgctcacagttttgaaggctgggaagtccaagatcaaggccccagcagattcggtggccagtgagggcctgcttcctcatagactcactctagtctcacatggcagaaggtggagaagctctctggggcctcttttataagagcactaatcccattcatgaggactccacccttatgacctaatcacctttaaaaggcccccacctcctatcactgtgggttaggatttcaacatatgaaccgggggaaggggcacaaacattcagaccaaagcacaggtgctgtttagttaggcacagggtgggggttgtggcagggggaggttacagcagtaaacaacagacacaaacctctgctgtcacggatgtgagcgttctaatatgtaagacaacaaacaaggtaaatggggcctggtctccacacctgtaatcccaatactttgggaggccaaggccagaggattgcttgagcttaggagttggagaatgacctgggcaacatagtgagacccccgtctgttcaaatatatatatatatatatattttaaaattagctgggcatgttggtgcgtacctgtagtcccggctatgcaggaggctgagatgggagtcccttgagcccaggaagtcgagactgtcgtgagctgtgatgatgccactgcactgtagcctgggtgacagagcaagaccatgtctctggataaataaatacacaaattaataaatataaaaataaacgagctatatacagattcacaattccaaatttttatagaagtctgaaaaccaggccaggcgcagttgctcacacctgtaatcccagcattttgggatgctgaagtgggcggatcacctgaggtcgggaattcaagaccagcctggccaacatggtgaaaccctgtctctactaaaaatacaaaaattagctaggtgtggtgacacacgtctgtaatcccagctactagggaggctgaagcaggagaatcgcttgaacccgggagttagaggttgcagtgagctgagatcacaccaccgcactccagcctgggtgacagagtgagactctgtctcaaaaaagaaaaagaagtctgaaaaccaaaatcctttcataactcatttatggcaaaacctaacctgaactgacctgagattatatatagcttttatttatttcacttgatgtgaatattcttgtgttttgctgaagataaagtgacttgaggattttactcctggtcccaccaggggtatgaaatacatagtatttataccctattacttttttaaaatctgaaaaatcctgaatttccaactccaggatcatggatttagctaagggatctctgatatgttagatatcgatatgtgataaggagaacactcaagctaaggaagccgatgtgacaagtgtgggatagggacatggtttgcaatttttttaagagagagggagggtctcgctctgtttgttgcttaggctgagcgacgagtggaatgcagtggcatgatcatagctcactacagccttaaacttctgggatccagcgatccagtgatcctcccaagtagctgggactacaggcacacaccaccatgcctgctaattttttaaatttttagtaaagacaatgtcttactatattccccaggctggtcttcaacttcagggctcaagcgatcttcccacttcggcctcccaaaatgctgggattaaaggggtgagctgccatgcctgggctatggtttgcaatttttaaaaaagtgatcaaggaagttttctctgagatgacactgggagggagggagccatgcaaatatgtggtggggagacctctaggcaaagggaagagcaagtgcgaaagccttgaggtgggaacatgccttctgtgttcagggaacagcaaagtggcctgtgtagtagttggcacagggtgagcaaggaggagacagaagaaaaggaggctggggagacggtggggaagttgaggagatggtggagctgatcatgggccactggggggatgagatgagagcatcagatagctgatggcagaggaaagacagcatcatgaggccccctgattgactgaccaaggctcctgtttccagagcttatacacctgagacccgtggtctctcctgacacacagctgtctccactggggccaggaagaaagcaaagcttcagcacaacggacagcgccaccacccaaaccagcaggccctgtctgtgatgctgacgcagagcgctggccaacaatgggaatagtgggggaagaatcaggtcccattcaggagggtggtgacagcagccctggccttgcaccaacccccatactgggatagatgatcttagagaacacaggctggcttgtacctgtttgggattggctgggcgtggtggctcacgcctgtaatcccagcactttgggaggccgagccaggcggatcacttgaggtcaggggtttgagaccagcctggctaacatagtgaaacaccattactactaaaaatacaaaaaattagctgagcgtggtggtatgcgcctgtaatcccagctactcaggaggctgaggcaggagaatcgcttgaacccaggaggcagaggttgcagtgagcagagatcatgccattgcgctccagcttgggcaacaaaagcgaaactccagctcaaaaaaaaaaaaaaaaatgaaagccttctcagctgggcacaagtggctcattcctgtaatcccaacactatgggaggtctaggtaggaggattgcttgaacccaggagtttgagatcagcctaggcaatgtagcaagaccctgctctctaaaaagtaaagcgtttaggcctggagcagtggctcacgcctgtaatcccagcactcagagaggctgaggtggcagatcacctgaggtcaggagttcaagaccagattggccaacatagtgaaaccccatctctactacaattacaaaaattagccaggagtggcagcatgcgcctgtaatcccagctactcaggaggctgaggcaggaaaatcacttgaacccgggaggcggaggttgcagtgagtccagatcgcaccattgcactccagcctgggtgacagtgcgagactcggtctcaaaaaataaaaaaacgacaacaacgacaacaaaaatcaaaagccttctcaacatgcccctgtgggtctcacagcatctcaatctcaagttgactaaaacagagctctctgatttagaatgtcacaacacaactatcccaggcacagagctctctcctgtctcctcatgactcgagtaaaagccaactttctcccaatgcctcagggcccttgcactgaatgaattctccacctagaatgttcttcccctgcatatttgcacagttcacaccctgacctctctcaggccttttctcaaatgtcgccttcccagcctgacccaaccaccctattcaaaattgaaaaaacaactggcccttccttctaacttcccttccttgtgcaaatttcttttctttttttttcttttgagatggagtcttgctctgtcacccaggctggaatgcaatggtgcgatctcagctcactgcaacctccacctcctgggttcaagtgattctcctgcctcagcctcctgagtagctgtgattacaggcgccccaccccgcccagctaatttgtgtatttttagtagagatggggtttcaccatgttggtcaggctggcctcaaactcccgacatcaggtgatccgcccgcctcagcctcccaaagtgcttggattacaggggtgagtcgccgtgcccggtcccttgtgcaaatgtctttttgcctatgcttgtcatgtgctcacagtgtttcaattcctcgtgatgctcagtgggtctttataggtctccctcactcggatgtcgctccaccaggacagagatttgatctgttgtctgttcactgtggggtctacagttactagaatgggccctgatacatagtagatactattgcttgaggatgccagtaaactaaggataggcacagagtgaccccaagccacctagttcctaccctgtagccccaggtccaaccctacctgcaggcaggtacattcctccatgattctcctctatggtaaatcttcttctgtcaagatgtgaagacaggccagacacagtggctcatgcctataatcctggcactctgggaggccaagacaggcggatcatctgaggtcaggagtttgagaccagcctcgccaacatggtgaaaccccatctctactgaaagaaatacaaaagaaaaaaaaataagctgggcatagtggtgtgtacctgtaatccaagctacccggaaggctgaggcaggagaattgccggaacccgggaggtagaggctgcagtgagccgagatcgcgccactgcactccaacctgggtgacagagcgagactccgtctcgaaaaaacaaaacaacacaacaacaataacaacaaaaacagataatcagttaaagagtgaaatgtgtgcaattttgggcaggcagtcaggggaagcctctctgagtagatgatattttgaccaaagacctaaaaagagtggagggaaaaaaaagtcggctggactcggtggctcacacctgtaatcccagcactttgggaggccaaggcgggcagatcacctgaggtcagaagtttgagaccagtctgaccaacacggagaaaccccgtctgtaccaaaaatacaaaatcagccgggcgtggtggtacatgcctgtaatcccagctacttgggaggctgaggcaggaaaatcacttgaacctgggagacggaggttgtgatgagccaagattgcaccattgcactccagcctgggcaacaagagcaaaactccatctcaaaaaaaaaaaaaaaaaaaaaagccagaaggatatctggaagctgactgctgcacacacaagaacatcaagtgcaaaggacttgtggtgaggctgtattcagcatgctcccatgtatgtaactgtgctggactctgtgatgtgggtgtcactactgagtatttgtgcatttttgtttgtttttgttgagatagggtctcgctatgttgcccaggctggagtgcagtggcacaatcactgctcactgcagctttgacttccttgggctcaagcaatcctcctgcctcagactcccaaggagctgggactacaggtgcacgccaccacacctggctaaatttttttttttttttttgagacagagtctcgctctgtcgcccaggctggagtgcagtggcgcgatctcggctcactgcaagctccatctcccgggttcacgccattcttctgcctcagcctcccaagcagctgagactacaggcgcctgccaccatgcctggctaatttttttttctatttttagtagaggctgggtttcaccgtgttagccaggatggtcttgatctcctgaccttgtgatctgcccacctcggcctcccaaagtgctgggattacaggcgtgagccaccgcgcccggccaacacctggctaattttgaagtattttgtagagatgggggtctccctacattgcccaggctggtcttgaactcttggcctcaggcaatcctcttgccttggcctcccaaagcactgggactacagacataagccaccacacctggcctgtatgtgcatttggagtgttgaaatgtgaggtgaatcatgcgttgtatatctgctgggggatgggggctgaggtggcgtgtttgacagcgcagtgtatcggtgtgcttcactgtgtgtgtctgtgtgtgtagtggcaatgtcatagttgcgtgttttgcaagagaaagggtgtgggggatgaatgtgggacagagtttgtatgggatgctttgtgtcaggatagggcaaggttggagcatgtggatgatggggattctgaaagtagaatatattcagagatgccatggtgtgtgtgtgtgtgtgtgtgtgtgtgtagaggggtgtgagtgagcccagctgtgtgagtgggtgtgttgggggatgtcgtggagctgttttctggtcccagagggagagagaaagcccaggaaatctcactttctccctgcccctgggtctccaggcaacggcaccactttggagttaccaggagacaaggttgccagggcaacacaggcgtgagtggcagctctggggcgaagtctgggtgagaagatccagccagggatcacgatcattcactttgttcctccctttctccctgtttctcatcaatcccacctcccttccttcattgtcttaacgagcacgtatttgagaacctacaaatgtgctaggtgctattctcggtactggagaacagaagtgaacaagacaatgtccctgctgtatctctccttcagtcttccagctcctgtctctttatctctcctgcttccttctttgtcctgcggtcctgccttccccccgtaccacaaaggcggccccacagaaccccttagccagtgaggaagtaagttgagaggcttcatctcacagactttcggggatggccgttgatgttttgtccacgagcctgtgtccccagacacacactccggcccatactcaggtgcacagaaagacaagcacacagctcatccccctctccaaaactctcagttgtcattggatgacatcagcaaaaccacacacaaatacatgccgatcacaatactcctctgagatatcataagccccattttacagcagggcaaactgaggctaggagcctttaaataatatgtcactcattctggtctactcctccaactttcaacccttatatttgtctgattagctgacaataatagtattcgtgctggttcccccagcagcctccctcagggaagggtcttatttccctcgaatgcacccattcctccgcataggttctaaccatttgcccattcacctgaggaatcgagttttgatggacagattcctagaccaatagagaaactaagtgaactgtaccgatgcggccacggcttgggcgggactaaggctgggaacgagccaccgattggtcagagctacgcggcgaatggcggagacgctgaggcgggtgctaaccaggggcggtgcggcctggtccggggaggagaacatgcctgccgccggaccgcctttgctgctgctcggtacaccaggatctggaaaaacagcgctgctatttgctgcggccctagaggcggcgggggagggccaaggcccagtcctcttcctgacacgaaggcctcttcaaagcatgccccgcgggaccggaacgactctagacccaatgcgactccaggtaaccgtgggggtgggagcagaggcgttctagccaatggtggagtagatccgggatattgagtaacaggtagacaagccaatggagaggacggtggaagagcgagccagggcagccacgatggggcggagtcaggcaggcggagtgaggagtggcaccacgcggagcttagttaagattgaagtgagagcccatccaatgatgggcggtgttagcaagaggcggtgcccagagattgaagtccggcccatcaaggggcggggctaagcttgggtccattctggacctgagttggttcctgttagtgtcaaggatggggtcagaccgagaatgctgggggagggttttccgtggaaaaattgcgctagagatttggccaaaaacaaacaagcaaaaatggcttgccctcaactaatactcggcagtgatgagtgctggaaaaacgggcgaatataagaatatttaacagctctgaactggttcatcctggaaccaaggaaagtatgcaaggaggcagggttacttttaaggagtctggcttcctgtgctgaatccggccctttccttctgtttctccttctagaagatccgcttccagtacccaccctcaacccgagagcttttccggctcctgtgctctgcccatgaggccccggggccagccccctcccttctgctgctcgacggcctagaagagtacctagcggaagacccagagccccaggaagccgcctacctcattgccttacttctagacacagctgcccacttcagccaccggcttgggcctggccgggattgtgggctcatggtggccctccagacccaggaggaagcaggtagtggggacgtcctgcacctggcactgctccagcggtattttcctgcccagtgctggctgcagccagatgcaccaggtccaggagagcacggcctccgagcctgcctggagccaggcgggctgggccccagaacagagtggtgggtgactttccgatcagatggagaaatgatgatcgctccgtggcccacccaggctggtgaccccagctcaggcaagggttcaagctctggaggccagccctgagctttggtgggtgactacctctctgtgcttcagtttcccatggctggaatacttacctcagggacatatgcagatccaaagacctaaacaatgtaaagtgctttttctcttttaaaagtatagcattatcttgtatatattttacccaatcaatatgttgtttatagtttcattgctttaaactttataaaaagagcttcaggccaggcgtggtggctcacgcctgtaatcccagcactttgggaggctgaggcggtcagatcaccagaggtcaggagttggagaccagcctgcccaacatgatgaaaccctgtatcaactaaaagtacaaaaaaaattagctgggtgtggtggcaggtgcctgtagtctcagctactcaggaggcttaggcaggagaattgcttgaacccaggaagcggaggttgcagtgagccgagattgtgccactacactccagcctgggtgacaaagcgagactccatctcaaaaaaaaaaaaaaaaaaaagtttgagacttccttctttttgcactcaacgttgttactaagattcatctacatttttttagttcattcctttttccatattgcatataattccatgggtgactataccctgatttcttcatcagattgccttatttactgctgcgaacattcttgcacacatgccctggtacgtgtgtgtgtttttaggggccgagacaggtggatcacctgaggtcaggagttcgaggtcagcccggcctacatggtgaaaccccgtctctactaaaaatacaaaatttagccaggcatggtggcatgcacttgtactcccagctacttgggaggctgagacaggagaattgcttgaacccgggaggcagaggttgcagtgagctgagatcgagccactgcactccagcctgggtgatgaagacgagactctgtctcaaaaaaaaaaaaaaaaaaaatcagtcaggcttggtggtgcacgccagtagtcccagctactcgaaaagctgaggcaggaggatcgcctgagcccaggaggtcgaggctgcagcgaaccatgtttgagctactgggctccagcctgtgcaaaagtgagaccctgtctcagaaaaaaaaagaagtagttaaagcaaaactcccactgagttacttgttgacaccaagtgtcatcagagtactttcttagaacatggcctgattcagaattacttttattattattagtggcagagactagctagtggcccttaaacagctttgcccttcctgggtgtacagctaaactaagtttcctggcctttcatgtgactggggtcatgtgactgtttccagccagtgaggtgtgagaagaagagaggaagcccatttccaggccagatccctcaaatggcccattgagggtcattgctgccctttttcttcccttgctgactggcagtttgtagaacaggggatccatctaagtaccctaagagaaggtagagctacagactggaagagtctgaacctctgactcatcccatggatggctgcccatttgagctgagttaggagagagaaatcatttaatgtggtaagccagtaagatttaagagctgtttaacatactattttgttatgttatgagtagcattcagattgcagatccagcttctgaataagctcaagaactttaacttctatccctatggcctatgcccaggggaagatgggacttaaagggtgtttgtagaaatcatggtagaaaaacttacatacatatgtgtatatatatatatagatacaaaaaaaaactatacatatttaaaaatactgcaaggttgtggtttcctgagcaggatggattgggcagacaaaatcagcaatgcccctgctcctgagagaggcctcgccatccctgttccataagtcttgagtctgcactggttctctgagtcatattggatccctgatcatctgcagcctggtgtcctaagagcaagccacatagctggggggcagaggctcagcggctgggataaggctgttctcataagggttggagtaggggccatcggataagcccccttgggctccctgggagtcccctgagctgtagtcagttgagatgccagagtcagataccacaaggtacaggtactttaggtggggtggggtagggggcagctcagggcacagtgtccatggacgcaagagctgggagctggggtccaggatagtgtactcaaagctggcagcagaggctccctctgggctgggcttcgaggccaaagcagatgagcaggaggatgcttctgagccttcatccatggccactatgtccacactgccaccaggccctgggaggtcctcactgggcgggttccggggcagcaaccatttgtccagcaccagataggtatcctgggcatgctcactgcccactggctccagcagggggccctcatcatctgtccccggctccactgcctgcatcgtcccccagcagcgctctgagaggacttccagggaagcaggtgggtcctccgtgaagggggtgcaggggctccaccacaggcagccatcattctggtacagccacagctgaagaaatagcaccaacctgctcagagaggcctgcagtttggctgcaagaagcagggaagcccaggcactgaggggacaaccaggccacctacctggaagttacccttgtgggtggtgaagaggccttcaaactcgctctctgggctcgggatgccaggccagatcttctgcttcagagccctgttgaagccaatataaatagttacatagatatgactcattgaatactcaccaattccccctccactcccagtcatagaggcacagatacacttggtccctgtgatcacaatggaggcagaggagtacatcagggccaggggacaggggttttggctgaagcatcagcaaggccctacaaaagggtaaatggaacagggtattgaagggtgcataggagttcaatataccttggtcattctccctttaatcctggccatggccaggtgcagtggtttacaccagcactataatcccagtactttgggaggctgaggtgggaggatcatttgaacccaggagttcaagaccagcctaggaaacatagtgagacccccatctctaaaaaaaataaaataaaataaattaaaaaacccaaaaccctggcccagatttttccaggaggtccatgatgtcacttcatagataaatattatgttaccttctggggtaatgagagaaggcatttaggataaaatccaagccaggcacggtggctcatgcctataatcccagcactttgagaggctgatgtgagcagatcacctgaggtcaggagtttgagaccagcctggccaacatggtggaaccccgtctctactaaaactacaaaattagccgggcatgcacgcctgtaatctcagctactcaggcggttgaggcaggagaatcacttgaacctgggaggcagagattgcagtgagccaagactgctgcactgcactacagcttgggcgacaagagtgactctgtctcaaaaaaaaaaaaaattccaaactcctccccaccaccctgcagaaggccctgcgttatatgacccctgtcacctccctcatctcaatatctgccacacccccttacataccactctagccatgtggcaattttttttttttttttgagacggagtttcactcttattgcccaggctggaatgcgatggcacgatctcggctcacccgcaacctccacctcccaggttcaagtgattctcctgcctcagcctcccgagtagcggggattacaggcatgtgccaccacgcttggctagttttgtatttttagtagaggtggggtttctccatgttggtcaggctggtcgcgaactcccaacctcaggtgatctgcctgcctcggcatcccaaagtgctgggattacaggcgtgagccaccatgccaggccatgccatgtggcaattcttgaagctggctgaacgttccaatctcattcccacctcagggcctttgcacttgctgtttcttctccccacttttcaagcggctgcttccttccaatcttcaggtttccactctgatgtcacctcctcctggaggccttccctgaccatcctgtcatgtcaccacattctgtttgtttctgtgatatcactcattacaatttgtcatcaaatatttcttgggtcccttgtttgttgacttgagatccacaaggtcagggacttgtggtcagggtctagcttgttctccattctctctccagtgcctggcacatgtttggcactctgtttgtattttccaaccaagtaaatgaacagggccatgaaagacgactagaagattgcttagcagacaaggcaggaagggcattccaggcagagggaacagcatgggcaaaagcttgggggtgtgaaaccacctagtgtgtgcttggaattacaaatacctcagaacggctagtctgatcatagtgtctgagaagcttgaccgcaggggtgcggaggcattcagggtcttaaattctttcactaaatccatctagttgattttacaaaggtgatgacactggggaaaggaactaacaaagggacccaagaaatggcagcccctgatgtagaaggaaaatcaggtgaaagtccccaagagcagaaaatgttaacgaagagtctgggtctagtctggcatgcatcccagccctgccactgatgtgaatccttactgcgtgaccttgggcaagtgcgtgtctctctctgagcctaggtttccatagtgaaagaggaccgttggcggggaggagtctgggcccagcgcccaaatggggagctcaccggcggtgggagagcagcgcgagcacggtcagcagcaccaggatgaccacgaggatgagggagagcgtcaggatgagggggtccaggtctaagaggcggggaggaggtcagggcggtgggcttgccccgtgattcgccctggctcctcctacacccccgcctggggcctcaccgctaggcgtcagcagcgacacaggctccgaccaggcgctccagaagccgccgaagctcggctcagccatacgcgcgcggacggcgaaggtgtagcgcgtccggccccgcaggttgctcagcacacactcggtgcggccctccaggatctccacctgggggcggaatcagggcgagggacgcgtagcagacaaaaatagatgacgtgggggcgggccctggtggaactgagccaatcaggggaaaggaaaacggtgccctagaattgcaatgggaccaataagagtagggggaggagcccaagaaagctcagggccaatcagagagagagtctctggtacgaaagggcgggacccgggcaatttaatatctgggctagcactcgtagagggacccgggcgctaaaggggtctagggttacgggccggagggagaagaagttggggttcaacaggcttgcgaggacattaggaaagggggtgtgtctgtgggcgtggaacggtcttcagcaccagggtaatgggatgtgggatgttacggaccggccctgaaagcggcaccgggcgcgacctcgagaggcgtggctgggccgtagtcagtggagctttgggggctgggccgtaggggctggcctcaccctctgtacgctccctgcgccgttgccggccgagacgtccacctcgtagcggatgtgagacgtcatgggtgtctcaggcggcgggagccagcgcaacactacgtggccgctctcgtcagccaaccgcgccaccagccccacgggggcgtctaggagcactgcaggcatgggggttggtcaggtgggcgaggactgagaccctctcctccgaccactcctccattcccagagcacttacctacttcattgatgtggatgacacggtgatatcgcggagcgccggaggctgctgtgacgcgcaactctaggggcacgaagctcgacgtgtcggctgtaggcagcgaacaccagaagcgcaccgcaccacgagccgtgggagcctggtgcaggcgacacagcttccatggctcatccctatgcgcccagggaagggagcaggttgggaggggggaccggggagttggcattgcccggcctgtggggggcagtgtgtatgtgtgacacaaggtctagccttgtgtgtgtgtgtgacaaggtgttccttcgtcgcccaggctggagtgcagtggcgcgatcatggctcactgcagcctcaaattctggggcttaagggatcctcccacctcagcttcccaagtagttgagaccacaggcacgcgccacgcctggctttttttttttttttttttgagacggagtttcgctcttgttgcccaggctggagtgcaatggcgctacctcggctcaccgcaacctccgcctcccgggttcaagcgattctcctgcctcagcctcccgagtagctgggatcacaggcatgcgccaccacgcccggctaattttgtatttttagtagagatagagtttctccatgttggccaggctggtctcaaactcccgacctcaggtgatccgcccgcctcagcctcccaaagtgctgggattacaggcgtgagccaccgcgcccagtctaatttttttttaagagacggggatctcgctgtgttgcccaggctggtcttgaactcctgggctcaagcggttcttccgcctcgaccttccaaagagttgggattacaggcatgagccactgctggcctccttttggatactacctcgagaaggcgtcccagccccgacgtagtaacgccttaccctcgatttggaggcgttgttatcccagcctgatgtttggggtcgcgttccagcggtgatcgcgggagtgttcgcgccccggcccatagagggcgtgccagccctggacccgcaggtttccctccagtgaccacgactggaggcgccgtcgggcctcaaacagcaggggacatacgaggctacgacctccagggagctctgccccaccccctccctccgcccttggaggcacccgccggatcggactcactcgagctggtaggagaagctgtagttgcccgggcccaccccagcgctcgccgcttcctcccagaaacacaccaagtcctccaaccgctcggtgaagcacagaagctcttcgggcccccgggccgccagcaaggccgctggggaggggcgacaaaggaagggcatgggggtctgagctctatcctcgggagacagccccctcctcttccctcccgcagcctgggcggacccgataagaaaaaagccccgccctgccatcttcccaagcgggtcccttggaggggtccgcagaggtggtgcccccctaattcccaggggcaagtttctcgccttactgtcccccgccgtcaccactggcgcacacctgcccacccagcggccagctgagctgggcgcggcgttcaagacctcgagctcgggactgccagccccgccccagcctaggacacgcgcgcggctgggggtgtgtgcggagaggcgggccccctatcggccccggcaggctccccgccaaccgatagcgccaaccgtgccccccgcctccctccctccaccgggccgggcaagtgatctggcgccctcacacaaaccgtgtttacagtagcctgtggcttggcccctctaactcggacccgggctttaccctccctcccctagggagggtcggcttggtccccaccccccagggaccttagcaccaagtcagcccccttaggatttagcatgtcccagactccctgaaaaggtaaaacgggaatgttaagcccactctagctcttgcccgggacgcgatcaggagtcttggatcctaacataccccaccccgccccccacccatccaggacccagtctaagggttcagatgccagcttggcccccaggacccggtcaggaagtccagaaacaggcatggcccccaggacctaggctgggagttcaggccccagcatggtcctgcaggctccagcgtaggggtccacacgcagctcatccttacctttgctctcgaacttggggtccgggaggttaggcgggggcgcccaggcggccccagcgagcaggagacaaagggagccgacctggggccagagggacgccccgaggtggtccatgatacagcccccgccacggggagcccagggctcctgcccctccgtcccccgcccccggcacagtccacagctgggtcagcagctgcctccgccggacgcagctgaccaggcccttcccgaccaggcgcctctaagtggcagatccccgagggggcggggccagcactcagcctgggtagagataagtgcctggcgggaggaggcaggggcccttcccgagcccagaggccgcttgggggcaggggagggagttgggccgcaacagctcccgttctggcttcagacacacgttttttttttctttgtggccctggacaggtgacttaccttacctgagcttcagacttctcatctgtaaaatctagcctggcacatagcgaacattccaaaaaatgtacctactgattttatcgcagaaatcagcatctcttcccagcctggaaataaataaaaattattttctctctctctctctctctctctctctctctctctcctttccttccttccttccttccttccttccttccttccttccttccttccttccctccttccctccttccccctctctctctctgtctcagggtgttgctctgtcacccaggctggagtgcagtggcacaatcatagctcactgcagcctctggactgaagcaatcttcccactgcacctggctaatttttaaaattctttgtagagatgggatcccactatgttgtccaggctggtcttgaaatcccggacttaagcaatcctccagcctccatctcccaatgtgctgggaataccagcacgagccactgaagccggccaataataatccttgcaacgaccagcagttgagtgtttgcacagtgctaggccatgctcctgggcagtatgcataatatgtgagattttcatttacgaatttttgggaaaaaaatttttaccacccacatttttattctcttgggctgggcccggtggctcacgcctataatcccagcactttgggaggccgacgtgggcaaatcacttgaggtcaggagtttgagaccagcctggccaacatggtgaaatcccatctctactaaaaatacaaaaattagccaggtgtggtggcgtgtgcctgtaatcccagctactcaggaggctgaggcatgagaactgcttcagtctgggagatgaagattgcagtgagccaagatcatgccactgcaactccagcctgggcaacagagtgagactgcatctcaaaaaataataataattggctgggcgcggtggctcatacctgtaatcccaacactttgggaggccgagacaggcggatcatgaggtcaggagttcgagaccagcctgggcaacatggcgaaaccacgtctctactaaaaatacaaaaattagccaggcgtaggccgggcgcggtggctcacgcctgtaatcccagcactttgggaggccgaggtgggcagatcacgaggtcaagagatcaagaccatcctggccaacatggtaaaaccccatctctaccaaaaatacaaaaattagatgggcgtggtgctgcatgcctgtaatcccagctacttgggaggctgcaggagaatcgcttgaacccaggagccggaggtttcagtgagccgatattgtgccactgcactccagcctggtgacagagcgggactccgtctcaaaaaatatatatatatattcgagcgtggtggtgggtgcctgtaatcccagctactcaggaggctgaggcaggagaattgcttgaaaccagaaggcagaggttgcagtgagctgagatcacaccattgcactccaggctgtgcaacaagattgaaactctgtttcaaaaaaataaataaatagtccatgcacagtggctcatgcctgtaatcccagcactttgggaggccgaggtgggtggatcacaaggtcaggagatcgagaccatcctggctaacacagtgaaaccctgtctttactaaaaatagaaaaaattagccgggcgtggtggcgggtgcctgtagtcccagctactcgggaggctgaggcaggagaatggtgtgaacccagtgggtggagcttgcagtgagccaagattgtgccactgcactccagcctgggcaacagagcgagactccgtctcaaaaaaataaataaataaaataaataaataaatataaataaatataaataaaataaaatggcaatactcctaccctgtttctattaagcaggtgggttttttgtttttgtttgtagccaatgtgcttattgtcacctgacatgtatttgatgttttgttattgattcgctgcccttactattccatgaaagcaggtttttttttttttttttagatggtgtcttgctctgttgcccatgttggagtgcaatggcacaatcttggctcactgcagccttcgcctcctggattcaagcgattctccttcctcagactccagggtagttgggactacaggtgtgtgccaccacacccagctaatttttgtagttttagttgaaacggggttttgctgtgttggccaggcttgtcttgagctcctgacctcaagtgatccccccgcctcagcctcccaaagtgctgggattactggcatgagtcactgagcccggccagggattgattgattgattgattgattgatttgtggagtcttgctcttgttgcccaggctgcagtacaatggcatgatcttggtttactgcaacctccgcctcctgggttcaagtgattctcctgcctctgcctcccgggtagctgggattacaggcacccgccaccatgcccggctatttttttgtatttttagtagagacggggtttcgccatgttggccaggctggtctcgaactcctgactttgtgacccgcccgccttggcctcccaaagtgctgggattacaggcatgagccaccgcgcccagcctcaggcagggatttttttttacccttttgttctttgctgtatccctagcatatagaacagggcctggagcacagtagaagctcaagaaatattttgtggagtaaaagattagagatgtagagaaaatcaagctgagagaggtagagaaacagctgatctcgtgttagccactgggtacaactgtgcctgcgtaaccctgcgcttttaaaaaacggaagtcaacgcaaatctcttcctcaggaaattgatatttagactgtgcatgtatgtgagagggaggtggaacaaacaagatggacacctgtttcaaaatttggtcacaataaattgttatgaatggcaaacgggccccagagttaaatgcatgttttctggagttggatcaatatttgaacagcacccacttaccatgggaccttgagtaagttacttaaccctcccttgcctgaagcctggctgacatggtgagaccttgtctctataaaacacgttttttttttgttgttgttttttgttttttgtttttttaagtaagccagatgaggtggcacccgtctgtggtcctagctactcgggaggctgaggtgggaggatcacttaagcccagaaggtggaggctgcagtgaaccatgttcatgccgctgcattccagcctgggtgacagagtgagatcccgtctctacaaaacattgtttgtttgtttgagagacggagtctttttctgtcgcctaagctggagtgcaatggcgccatctcggctcactgcaacctctgtttcccgggttcaagcgattcttctgcctcagcttcccgagtagctgggactacagatgtgtgccaccatgcccagctaatttttgtattttttttagtagagacggggtttcgctatatgttggccaggctggtctcgaactcctgacctcaggtgatgcgcctgccttggcctcccaaagtgttggagtgttgggattacaggtgtgagccaccacgcccagccaactttttttttttttttttttgagacggagtctcgctcagctgcccaggctagagtgcagtggtatgacctcagctcactggaaccaccgtctcccaggttcaagtgattctcccatctcagcatcctgagtagctgggattataggcacccgccatggctaatttttgtattttagtagagatagggtttcaccatgttggccaggctggtcttgaacttctgacctcaggtgatccacccgcctcagcctcccaaagtgccaggattacaggcgtgagccatcgcacccggccaactttgtttttaagttagccaggcgaggtggcatgcgtctgtggtctcagctactcagggggctgaagtgggacgattaattgagcccaggaggtggaggctacagtgaaccatgttcacaccacggcactccagcctgggtgacagagtgagaccccatctcaaaaaaaaaaaaaatagtggacgataagtgtctcttccggcccagacatggtggctcttgcctgtaattccagcactttggaaggccgaggcaggggaatcaattgaagatagtagtctgagaccagcctgggcaacataacaagaccctgactctacaaaaaagaagaaaaattagcctggtgtggtggtatgtgccggtagtcccagctactcaggaggttgagtaggatcacctgagtctaggagttcgaggctgccacgagctatgatcgcaccactgcactccagtctggttacagagcaagacactgtctctaaaaataaataaataagtaaataaataaataaaatgtataaagtgaaaataatgtctactccatagagctatggtaaggattaaattagattgtgtcaagttctttttctttttctttttttttgagatggagtttcgctcttgtcacccaggctggagtgcaatggcacaatctcggctcactgcaacctccgcctcccaggttcaagtgattctcctgcctcagcctcccgaatagctgggattacaggcatgtaccaccacactccgctaattttgtatttttagtagagacgggtttctccatgttgaggctggtctcgaactcctgacctcaggtgatccgcccgcctcggcctcccaaagtgttgggattacaggcgtgagccaccgcgcctggcccctgtgtcaagttcttaaaacagtatcttgacatacaataagcattcagtaagtatagcaatttgcttaaactagttcaagaaggatgctgaactaacatccaaatgatcttaagaggctggatgcggtggctcatgcctgtaatcccaacactttgggatttgggagacagaggaaaaaaatacccatttgggcaaaaaatatccaaattgtcttaaggtctttcttttctttttcttttcttttctttttttttttttttttgagacaaagtctttctttgtcacccaggctggcgtacagtggtgcaatctcggctcactgcaacctccgactcccgggttcaagcgattctgtcctgcctcagtctcctgagtagctgggattacaggcgtgcaccaccacgcctggctaatttttgtatttttagtagggatggggtttcaccatgttggtcaggctggtctcgaactcctgacctcatgatccacctgactcggcctcccaaagtgctggattacaggcataagccactgtgcctggctggtcttaaggtcttaatactcacagaagaccaaaatttaaaaaaagcctgtaaaggagcggcaaggcacagtggctcacacctgtaatcccagcattttgggaggccaaggcaggtggatcatcaggccaggagttcgagaccagcctgaccaaaatggtgaaaccccgtctctactaaaaatacaaaaattagccaggcgtggtgacacacgcctgttatcctacctactcaagaggctgagacaggagaatcgcttgaactggggaggcggaagttgcagtaagccaagttctcgccattgcactccagcctgggcgacaaagcaagactctgtctcaaaaaaaaaaaaaaaaaaaagcatgttgtgtgctagtaattggtctttcatcagaccttatatgatacttaaatttctgtatctctactcccaacccacataattcctgggcattcctcattattgctccagggataatgtttgaaaacctagtgattattttttgcccattcaccagaactcccccttctcctcataacagcccccacatttaatgtccacttatggactctcccaggctccacccctgtgattcaaagtttctgtgccagctcaaagggtgggcgcaggacccaggcctggctaatcagcacatctcattcccctgaacacagtgattggtttagaggtggacacatgacacaaattggcccaatgggcgcctgctctgggactttttgctggagctgatgggaaggaggggctctgcttgcatgggatgggggagctgttgggatataagcctatgcctccacaaggtatgagcctgccttggagtagagctatatatatatatatgtgtgtgtatttttttttttttttttttttttgtagagacggagtcttgctctgtctcccaggctggagtgcagtggagcgatctcggctcactgcaacctccgccttccaggttcaagcaattctctcgcctcagcctcccaagtagctgggattacaggtgcatgccaccacacccagctatgagtacagctatattaaataaaatattatttgggctactgtaacagcaactcaaataatagtggcttaagtaagataaaaatttatttctcttttatgtaacactccaagtatcaacagtccaatatggtagctccctggtctcataggcccaggctccttctagcttgttgctcagctattcagacagtgtgaaccacctaatccaaaatgatccactccacgtcttcattcccaccagcaggagggaggaaagggggaaaagaaggacacaccgcttccctttaagggcaggttctgaaatttgttcacatcctttccctttatatcttattggccaagacttagccagtggccagatatgaccacaccttgctgcagaggaggtgggaaatatggcttttactttgggaggccagctaaaaatcagtggttccattaccatagaagaaggtgattaaatttgaggggacaatggactatctcattctcagagcaaatcagagcaaagagacagcaagaaaaccctgatgacatcttatgagtgcctggatgcaactgtgcctgaagccctactcattggacatttcaactgcataagccacaaatgtccttttttgcacatgcctctttgaattgggtttttggtcgcttgcaacagaaagaactcgattagtgcaatgagatgtaaagaccatagctgatgttctctgctgagtaggagctcataagtgggcatattattgtggttgtgactatgtagcagttcgccctacagctcatttcatcctctctattgtactccaacgctgacagagagctcacgcctctcttttcatcctcacaatccttttctttttcttttttttttttttccagacagaattttgctcttgttgcccaggccggagtgcagtggagcgatctcgactcactgcaacctctgcctgcctggttcaggtgattatcctgcctcagcctaccgagtagctgggattacaagagcctgccaccatgcccggctaattttttgtatatttagtagagaaggggtttcaccatgttggccaggctggttttggaatcctggcctcaagcaatccacccgtcttgcccccccaaagtgctagagccactgtgcccagcatttttttttttttttttgagatacagtctcactttgtcacgcaggctggagtgcaatggcatgatctcggttcactgcaacctccaccttctggattcaagcaattctcctgcctcagcctcctgagtaactgggattacaggcacccaccaccatgcccagctaatttttatattttttagtagggacagggttttaccatgttggccaggctgaccttgaactcctgacctcaagtgatccgcccacctcagcctcccaaaatgatgggattacaggtgtgagcactgcgcctggcccttttttttgctttttgaaacaggatctcgctctgtcacccaggctggagtgcagtaatctcggctcactgcaacctccacctcttgggctcaagtgatcctcgtgcttcagcctccagagtagctgagactacaggtgcaggacaccaaacctggctaaattttattttattttttgagatggagtctccctctgtcgcccagactggagtgcagtggtgcgatctcggctcgctgcaagctccgcctcctgggttcacgccattctcctgcctcagcctcccgagtagctgggactacaggcgcccgccaccacgcccggctaatttttttgcatttttagtagagacggggtttcacctagccaggatggtctcgatctcctgacctcatgatccgcctgcctcagcctcccaagtgctgggattacaggcgtgagccaccgcgcctggccaatctttgtatttttttgtagaaatggggtctcactatgttgcccaggctggtctcaaactcctgggctcaaaatccttccaccttagcctcccaaagtgctgggattacagatgtgagccaccacacccaacctctttttctcttctttgcacagatgggttatctgtgacaggaagaggaagaaggtgagggcaagtgaaagggcccatcctcacagcccttattgactcatgggtaatgatgctatttgtttctaattctgatggaatttcagttagtcactctcccatatatacagtagaaaagaggcatatcaccccaaaaatgttggggaaggaagtcctaaaccctctttgtgtgataggatcctttatttatttatttagtgagatgtgatctcactgtattgcccaggctgctctcggactcctgaacttaagcaatcctcttacctcagcctcccaaagtactgggattaccctcctgagccactgtgtccggccagacaggatcctctctggcatctgggttgagtgtcatacccgactcaacacctttcttagggctcttagtttttttgtttttgagacaggatctccctctgtcctccaggttggagtgcaggggcccagtcactgctcactgcagcttcaacctcccagggctctggtgattctcccagctcagcctcccaagtaggtaggattacagtctcatatcaccacactcagaaaattttttgtttgttcatttgtttgtttgtttgtttttgagatagggtcttgctctgtcacccaggctggagtacagtggtgtgatttccactcactgcaacctccaccttccgggttcaagcaattctcctgcctcagcctccccagtagctgggattacaggtgcatgacaccacgcccggctaattttttgtacttttagaagatggggttttgccatgtcggccaggctggtctcgaactcctgacctcaggcgatctgcctgccttggcctcccaaaacgctgggattacaggcgtgagtcaccacgcccagccaaatttttgtattttttgtagagacaggatctcgttatgttgcccgggctggtcttggctcttaggtttctctctctctgtgtgtttgtgtgtgtgtgtgtgggtgtgtgtgtggtagctgttttcctttatcttgataaagggtgaacatggcacacaggcgcaaaataaacaagactgacacctgtttcataactctggtcactattttcatccgcatctgtcacttctgatgcgtctctaacatttataagatttctctggggagggatttgacgtatccatgccccacctctttctacatttatgggattgagctctccaccagccacccatgggctgatgtctttggaatatggatctagtaccaacagagtcagaaaaagagatggggtccaatgggctacagttgggtggtggtcctgggatacacagcacagtggcctctactgggggatggcagctttccaggagaagagtcgcaagcttgcctgtgggacttgtgtcttgtggagaggacagggctgcctcagcttggggagacagacagagtgttccgggtcccctctttccgccgcagcatgaagtctctgggggcgactggactcatggcatagaagacgttggcattgtcaggaatcaggagcactggtcaggagtggagatggtggtaataggccctcacaaccttgtgtcacccccacagaggacccgggagcctcctgccactcacccgcgaacctgaacagccatgggtccctctgcagctactgccaagccaagctcattctgctgtcactgggaacctggacgacttctcacttgaaaacttgcaccacctcatgccttcccttatcataagcctgggcaacctcctaatattctccccctcaccatagagacaaggcaacctgcagtaaaagtttgagcaaactggccgggcgcgatgcctcgtgcctgtaatcccagcgctttgggaggccgaagtgggtggatcacttgaggtcaggaattcgagaccagtctggccaacatggtgaaaccccgtctctactaaaaataccaaaaaaatgagctaggcatggtggcacatgcctgtaatcccagctactcggaaggctgaggcaggagaatctcttgaacccaggaggtggatgttgcggtgagccgagatcctgccattgcactccagcctgggcaacagcacgagactccatctcaaaaaaaaaaaaacaaaaacaaacaaaaccgacaacctgcagtaaaagtttgggcaaacttagaccaccctagaccaccccccgccaaacaacttcctgctcaccctacccctcccccacaaccactcccagccaatcccatgctgctgtcaccatgaacttgaataacttcccacttccagcctgcacgagcttgtggcctcacactcaacacctgaacaaccacaagcatcctttcctaatatccagccaacctcatgccatgtacttcagcgtgaatacgctcaatcccttgcttctccctgtcagacaggacaatctcatgcttccgcggctatccatttgcctctctcccgtcccaagttcagataacttcagggtcccagtggtgaacaaacttagttctcacaaatctaagcccagatgccctttagtctcccatcccatcaggttgagcctgaacaatctcatgatgctacaaacttaagatcagacaaacttctacactcccttctctcactcgaccctagacaatctattttttctttttttttgagacggagtctcactctgtcgccaggctggagtgcagtggcgcaatcttggctcactgcaaccttcacctcctgggttcaagtgattcttctgcctcagcctcctgagtagctgggactataggcgcctgccaccatgcctggctaattttttgtatttttagtagagacgaggcttcaccatgttggccaggatggtctcgatctcttgacttcgtgatccacccgcctcggcctcccaaagtgctgggattacaggcgtgagccaccatgcccggcccccttttttttttttaattgagacagggtcttgctctgtcacccaggctggagtgcagtggcgtgatctcagctcgctgcagcctccacctcctaggctcaagtgatcctcccacctcagcctccccagtagttggagttgggaatacaggcacatgccaccatgctcagctaatctctctctctctctctctctctctctctctctctctatatatatatatatatatatattttttttttttttttttttttttttttgagacagagtcttgctcagtcgccaggctggagtgcagtggtgcgatctcggctcactgcaacctccgcctcctgggttcaagcgattcttctgcctcagcctcccgagtagctgagactacaggcatgtgccaccatgcccagctaatttttttgtatttttagtagagacggggcttcaccatgttggccaggctggtctcgaactcctgacctcaagtgatccacccgctttggcctcccaaagtgccgggattacaggcgttgagccaccgcacccagccaatttctctattttttgtatagatggggtctcctcatgttgcccaggctggtctcaaactcctgagctcagacaatccacccaccttgacctcccaaagtgctgggattacagttgtgagccaccatgcccagcccatcctacaaattgaaggtcagaaacactcccttctgtcacttgtccgtggacagtctttttttttttttttttttttaaacagagtctcgctctgctgcccaggctgaagtgcagtggtatgatctcggctcactgcaacctccgcctcccagattcaagcaattattctcctgcctcagcctcctgagtagctgggactacaggagtgtgccaccacacccgactaatttttgtatgtttcgtagagacggggtttcaccacgttggtcagcctggtctcaaactcctgacctcaagtgatccgcccagcttgacctcccaaagtgctgggattacagacatgagccactgcgcctggccggaccctggacaatcttattgtcttttaaattttaggaagatgacctttggtacctctctctcacactgagccaagacaatctcatgaccctacatcgttgggttacaggtattttatgtcctcttacctccactgattatcttacccctactctctgcctgaagcacctcacagccctgtgaacccgggtaaccttgggctccatccttgggcgtggtcagtctgctcgcctccccgctgccccctatcctgagctccaacccatccctgctcaccccggtccccaggaaggacttgaaagagctgatagtcacaggcccagggctggggcacattgtgcttctgcaaggctcgccggaccacgctgggggctttgtcctgactggtcagctggaagagaggggcgggaggtgaggtgagggccccggccccaagggcagggcagcctccagcagacccccagcccagcccctcaccaagatgcttcgatacaggttcccgtggtcattgtcgatgctgacgcggatgacacgggcctccgagctctgctgcgccgggagggggattcgagggctgcccagaggcaaagcgaagggccgggggctgggcaggtccaggctcaggggcagctgcaggcagtaaggggtggaggctacagcttggcccatctgcagatgctgagggctagaaaagcacgaacaccccagccaccactggtgcattcaatagccccacatttaaaatctcaagaaaacattggctgggcgcagtggctcatgcctgtaatctcagcattttgggaggccgaggtgggcggatcacttgaggtcgggagttcaagaccagcctggccaacgtggtgaaactccgtctctactaaaaatacaaaaattagcagggcctggtggcgcatgcctgtaatcccagctacttgggaggccgaggcaggagaatcacttgaacttgagaggcagaggttgcagtgagccaagatcacgctactgcactccagcctgcgtgacagagcaagactccatctcaaaaataaataaataaataataaaataaaataaaatctcaagaaaacatactactaccccctacacatgcagagcctgggacatgcaactggagtacattcacaagcctgcatatacaccaccctaccatatacagactttggttacctgttatagaaacagacatgaacagtgtccatatacacacaacccatgctcatacacaagaaatcctgtgtacatacatatgctgacagcggttatacacccacagcccatgccaatgaacaaccccacacatgatctcatgaatactcaggcccacatttcctcttctggtacacagattcttttctttttcttttcttttttttttgagacagagtcttgctctgtcacccaggctggaatgcagtggtgccatctcagctcactgcaacctctgcctcccaggttcaagcaattctcatgcctcaccctcccaagtagctgggattacaggcctgtgccactatgcccagctaatgtttttatttttagtagagacggggtttcaccatgttggctaggctggtctcaaattcctggcctcaagtgatccactggcctcggcctcccaaagtgctgggattacaggcatgagctaccatgcccagccttcatttccttcatttccttttctttttttgtttttcttttagagggagcctcgctctgtcaccaggctggatggagtgcagtggcaccatctcagctcactgcaacctccgtctcctgggttcaagtgattctcctgcctcagcctcccaagtagctgggactacaggtgtgcgcgaccatacccagctaatttttctattttcagtagagacagggtttcaccacgttggccaggatggtctcgatctcttgacctcgtgatccgcccacctcggcctcccagagtgctgggattacaggcgtgagccaccgtgcccagtctctttttcttcataaacaggatctcgctctatcatgcaggctagagtgccgtggcatgatcgtagctcactgcagcctcaaactcaagcgatccttccacctcagcctgctgagtagctgggactacacccagctaatttttttgacttttaatagaaatagggtctcactatgttgcccaggctggtcttgaactcccggcctcaagcaatcctcccactttggcttcccaaagtgccgggatcacaggcaatagccaccgtgtctgccatggtatgcagattcttagggacatacatgtcctcaaaaaagtgtaggctgggtgcggtggctcacacctgtaatcccagcactttgggaggccgaggtgagtgcattgtttgagctcaggagttcgaaacccacctgggcaacatggcgaaacctcatctctactaaataaaaaaaatagcagggcatggtggtgcacacctgtggtcctagctacttgggaggctgaggtggaaggattgcttgagcctgggggaggggtggaagttgcggtgagctgagattgcaccgctgcacttcagcctgggtgacagagcaagaagaccctgtttcaaataaaaaggggtgtgatgtgattgcaccctagatgacccatgggcaagcagttacacaggtccaaatctgagcacgagtcggatttatgagtgatcacccaaacagggccgtgcagatgcatgcaatcccctggatggataccccgggcgctcagtgtgcctcctgtatacactcctggccccacaatcctgtgtgtacacatgtgcatgcacacacacgtgcacacacacagagcctgggtgcccgcaggcccgcatgcacacacaagccgtcttggtaccttggtgctggggccctggggccctggagaggccgggggactgccagcaggagcatctctgcttctaggacttgaggggggtgaccctggggacacactgggggagatgcagaggctgaggtggggtggctgtgctgactcctgatcccatgatccccagtcccatcaccaagcagaatgctcacctggaggtgggggatgaggggtccccgggactcccactaggtgatgagcttttctctcgggcaagcttcctaaggatggggacaggggatgaggctaaggcaggagcagcccttgctgatatctgcccacatcaccgcccctacacacaccccgagactcacgcactgagacgcttggtgaggctgatccgccgtcggatgcgtggggagctggggcaggaggcagctggtggctcaatgacccgggagagccggtagctgaggggtcaatatgtggatgaggtggtgggggcaggaaatacaggggatggagagataagagttggaatcagttgggaggtgggtttggggtgtaagggggagcagccagaggtggcaccccacatgccagggtcagggtggtaaatgagggtcattgagcatcaaggtcttatcagagatgggacaggatggctggtcaggaggtcacaaagagattcacagggtggcactaaggaatcaaattgggtcaggattaaagtcagggtcaggactgggtgcagtggctcacgcctgtaatcctagcactttgggaggctgaggcgagaggattgcttcgggtcaagagttcgaaaccagcctggccaatatagtgaaaccccgtctctactaaaaatacaaaaaaaattagccaggtgtggtagctcgcgcctgtaattgcggctaccggggaggctgaggcagtagaattgcttgaacctgggaggcgggggctacagtgagccgagatcactccactgcactccagcctgggaaacagagccagactctgtctcaaaaataaataaataaataaataaataaataaataaataaataaataaaataaagtcagggtcagactggggtcaggtcaccattggggtcaatggttagggtcacagttatatagaaagaaaggacacagttgtcatagtcaagctggacagtcaaacataaaagttggagtcagttactcagaactgagggtcaagggttggggtcagagagtcagatgaggggtcatgaataaggtcatgggtcagataggaccaaagatggggaagtcaacagatgggacagttgagttgaatggccagctgaatgctaaagttgaggtcagaaaatcagatggggttgaaattgaggtcagaggtcaattgtgactatttttttttttttttttttgagacagggtctcactctgtcacctagactggaactgcagtggcgtgattttggctcactccaacctctgcctcccaggctccagcaatcctcccacctcagcctcccaagtagttgggaccaacggcactcaacaccacattcagctaattttttttttttttttttgagacggagtctcgctctgttgcccaggctggagtgcagtggcaccatctcggctccctgcaagctctgcctcccgggttcacgccattctcctgcctcagcctcccaagtagctgggactacaggcgcctgccactacacctggctaattttttttttgtatttttagtagagacggggtttcactctgttagccaggctggtctcaaactccttacctcatgtgattcacccgcctcggcctcccaaagtgctgggattacaggtgtgagccaccgtgcccagccacgttcagctaatttttgtatttttttgtagatatggggtttcgccatgttgcccaggctggtctcgaaatcctgggctcaagtgatccacccaccttggcctcccaagtgctgggattacacgagtaaaccaccaggcccagtctatttgattcgactggagatactgcaaggtcacaggttgtagtgggggatcagggctcaagagggggtcttgggaggagctggaggtgtgtatggagtgggtggaatccagttggtgacccaggctcagctggggtggggctgggacaggctacagggtggtcacctctgctcctcggtgagctggttctgggcatgcagggcagccaggatgggcgggtgggggctcagggtgtagctctgacagcgcctctgcagctgctggatgcgggccaggatctcccactcctggaggacgagcctctaagaccctacccctgccccacccccaccctcaggcaccaccacacccactgtagcctccactcaccttcctcctcttctcaaagttaatgagatccccctgggggcaaagtgtgtctgaattgcagcacccagggtcaagggtcaagggtcaaggtcaggggctgggatgtcaggagccccactgtagtaagggagtgtggggtggtgtcaggagtacaggtaggatcaagggtggatattgggaggcccattgtgctgggggcaagtggagctggggtcaggggtcaagggtcaggggtcagacctccaacatatccggcagggctgtgtccagcataaccaggtccgtaaggaaggtgccaaggtaggggacagggcctgggggtggtttctgcagcccccaaagctccagtcacttggggccattactgaccccatcaccatccacaaccctccctgaaggtcccacttgtccccatcccaaactgtaatcactcactgagggcaggctgcctggggtgttgtcctcttcttgggatccctcagtggcctcctcctgagggaagagaaaaactgagccaggtctggggtctccttggacaattcctcaggaacgatgcctgcagacccatcatatatacccttcatgctttgagtaatcaaaagtcagtggtaggccaggtgcgatggctcacgcctgtaatcccagcactttgggaggccaaggcgagcagatcatgtgaggtcaggagttccagaccaccctggccaatatggtgaaaccctgtctctactaaaaatacaaaaattagccgggtatggtggctcacacctgtagtcccagctacttgggaggctgaggcagaaggatagcttgaacctgagaagcagaggctgcactctagagggagtgtcgctctgtcacccaggctggagtgcagtggcgcgatctcggctcactgcaggctccgccccccggggttcacgccattctcctgcctcagcctctcaagtagctgggactacaggcgccccccacctcgcccagctaattttttgtatttttagtagagacagggtttcactgtgttagccaggatggtctcgatctcctgacctcgtgatccgcctgcctgggcctcccaaagtgctgggattacaggcgtgagccaccgtgcccggccaaaaaaattttttttaagaaagggctggacatggtggctcacgcctgtaatcccagcactttgggaggccgaggctggtggatcacatgaggtaaggagtttgagaccagcctggctaacagagtgaaactctgtttctactaagaatataaaaaactagctgggcatggtagcatatttctgtaatcccagctactcgggaggctgaggcagaagaatcgcttgaacccgggaggcggaggttggagtgagccaagatcgcaccattgcactccagcttgggcaacaagaccaaaactccatctcaaaaaaaaaaaaaaaaaaaaaaagaagccaggggttaaggcccactctagaagccagaccaccttggatgagggtagggaggagataaacagcagggagcaggccccatgagaggtggggcttgtgggtagtggcccccagggctggccttaacaaggagagaatccttgtccgcagctggatggcacaggcctgccagggatctcctgggtatcctgaatttgctgttgtttacttactttttatttcattttattttgagatggagtctcactttgtcactcaggctggagtgcagtggcctgatcttggctcactgaaggcttgaccgcccaagttcaagcgatcctccctcctcagcctcctgaatagctgggactacagacgtgcaccacaaacgcccagctaattgttgtattttttgcagagatggggttttgccatgttgcccaggttggtcttgaactcctgggctcaagtgatcctctcaccttggcctcccaaagtgttgggattataggcgtgagtcactgagcccagctcacgtgctgttctaggtgctgggcaggaaaacagggtttcactctgttagccaggtgaaatttggctgggagtgatggctcacgcctgtaatcccagcactttgggaagccaaggcaggtggatcacctcaggtcagggattcgagaccagcctggccaacacggcaaaaccccgtctctaccaaatacaaaaattagccaagcgtcgtggtgggtgcctgtaatcccagctacatgggaggctgaggcagagagaattgcttgatcctgggaggtggaggttgcagtgagccaagatcgtgccactgcactccagtctgggtgacagagcgagactctgtctcaatacaaacaaacaaagaaacaaaaaaacaaatgatgacgacaacaacaacaacaacaaaaaaccagatgtgtggttttggggatgatggaggctgggaaggcctctcagaggcagggacatttaatcagagaccagaaggaggtgagtgagcaagttgcatgcaaacctggaggggtggagaatgttccaggcccagggatccattctagattcactctaaaaaccagcgcctgattgcaatgagaatctaaatcttgcctataaataagccagacttttgacacacattttttagttttgcttatcaaggtaaagtcctcagaacattttttttgttcccaccctgtgctatgactctggccttaagtaaccttttctttgtgacttcttgtgttttgctgagtgaataaatagggcagtcactgacagtcaactataacgcaggaagtagaggaaagaaaaacgtgcaacccgccagggacaaggataaggtcattgctgagcggtagggaaggacagagtgtcctgactatagcagggagattacccctgcctggccccaagtccctcccccgacttcccgggcctaaaatccctggagtctgcatccatctctacctggaaaagaatctctctgctgctgaggtggttgttctcatcggagaaaatctgcgaaagtttcctgaaagtagatagcggttccctggaaggacaggagaagggtggtcaggggtcagtggcttgggagggtcagacctgggatgggctggggaacaggtcccgccccagctcaccggctcactgccccccagctgcgcttgagccggtagatggggttagattgcagggcggacaggatggcgcgcaaggaggagaagttccgcagttctcggcagcgctgccaggcggtggggacgcaggtcagacccaggcattatccacctttcatcctgaaacttcttcatctttttttttttttttttttttttttttttttttttttttttttttgagagatagggtctgtggcccaggctggagtgcagtggctcgatcatagctcacttgctgcctggaattcctgggcttaagcgatccacatgcctcagcctcctgcctcagtagctgggactacaggcgcgcgccatcatgcatggcttattattattattattattaattatttggacagagtctcgctttatcccccaggctggaatgcagtggcccgatctcgagtcactgcaacctccgcctcccgggttcaagtgattatcctgcctcagcctcccaagtagctgggattacaggggcacaccaccacacccggctaatttttttgtaagtctcatttttaatttttttaattttttttttttttctagaaacattggtctcactatgttgcctaggctggtctcaaactcaagggctcaagcgatcctccctctccccaaagtgctgggattacaggcgtgagtcactgcgcccagcctgatcccgtgacttgtgacgccaggtcggacccctgggtgttgtctcacatccgacaagctaccaagactcccacttattccctaggattcccttcctccctcctccctcgggctccagcccctccccagctgcccctccagcccctgcctccgaccttgacttctccggtccgggctccctacttctcccagctcccttgggacctagtcgtgcccgcggcctctctgcaggacccagaccctcctccctgaacccaagtctcaccctaggtatcaactttccaccccgttccctccctcgcctagactcgcccctatctctctccggagccctcattttttccccttgccccagggcccgcccccgcatcccctctccgcgcccgcaacacacctgggcgatgcggatccacttctccagccgctgcgccctctgcggggcggccaagcccggtgctccgagcacggaacccagcacacagccggtcacggtgttgaactgggccacggtggcgcgcacagtgggggaggcgcctgcagcccccggccggtccctctgcgaccacacggagcccaagcactcgtagagcctcaccttggagaagagctcctgggccaggggaggggtgtgggattggtgcttagcagaacctgtcccctcactgtggctcatcccgaccctgtccgggatcctcaccaagtctatgagggtcagctgctcggccacctcgtccacgctgaagtccaggagctggggaccttgaggcatgagcccttcctcttcctccgcgcaggcctctgaagagtctgggtcagaagtttgggcaactctgggaggtcctgatcattagaaagggttacaaactctcaagtttgaatccaagactggctgtgtgaccttgggtgagtccctgtccctctctgaggctcactttcctcatttgtaaaacggagagctctcttaaatttttttttttttttgagacagtcttactctgttgcccaagctggagtacaatggcgcaatctcagctgaccacaacctccgcctcctgggttcaagtgattctcctgcctcagccttctgagtagctgggattacaggcatgtgccaccatgcccggctaatttttgtatttttaatagagacgggctttcaccatgttggccaggctggtctcaaactcctgacctcaagtgatctgcccgccttggcctcccaaagtgctggcattacaggtgtgagccaccacgcctggccctgagtgtttttaaggatgtaacagcaacagtaatgttcactaagcagctagtgtggatttactcagtaactcaccactgagttactgtgagtccagtgagggaggtactattatttatccaccttttacaattaaggaaagggaggcaaagaacaatttgtcacacctttggtaaatggcagggcaggggtttgaagccgggtactcaaaggccagagaagaaaatagagctttatgatttttaacatgtattaggataagattaatctgacctcttttttttggaaagaggtgatacgacttcctggttcagggaaggctattgtcagaaagtctcaaactcagatgcaaactcgtccactagcttgctgtgtagagcatgtattttaacctctctgtgccttttttttttttttttaagacggagtctgactctgtcgcccaggctggaatgcaatggcgtgatcttggctcactgcaacctccgcctccaggtttcaaccaattctcctgcctcagtctcccaagtagctgggattacaggcacgagccaccacgcccagctaacttttgtatttttgtagagacagggtttcaccatgttggccaggctggtcttgaactcctgacctcaagtgatctgcctgcctcgacttcccaaagtgctgggattgcaggggtaagctgtgccttctttttgaaacaggctctcccttggtcacccaggctggagtacagtggtgtgatcacagttcactgcagcctcaaccttttgggctccagtgatcctcctgcctcagcctcctgagttgctgggactataggcacacaccaccatgcccagctaattttttattttttgtagagacagggtctcattatgttgccaggctggtctcaaacacctgggctcaagcgatcctccctcttggcttcccaaagttttgggattgcgggtgtgagccagtgcgcctggctgtggatttcgtttttgttttcgtttaagatcatgctgccgggcgctgtggctcacgcctgtaatcccagcactttgggaggccgaggcgggtggatcacctgaggtcaggagttcgagaccagcgtggccaacacggtgaaaccccgtctctactaaaaaaaaatacaaaaattagccgggcgtgatggcacgcgcctgtaatcccagctactcggggggctgaggcaggagaatcgcttgaaccctggagacggagcttgcagtgagccgacatcgtgtcactgcactccagcctggcgacagagcgagactccatctcaaaaaaaaaaaaaaagatcatgctaccagactgctataaagtgctgaacaaatatgaataattttactttagtggattttgatggtggcaccctggaggggaaactttggaaactgggatcctgaattgtgccctctagcctccaaatgtatctccagacatttgtgtctttgaaaaacctgtttgtggctggtcccaaggtagtgacttatctcaattgattgttcacagttacagatcgaactccttgttctactctttccccccttctcactactgcacttgacttgtctttaagaaaggaagaaggggtctggcacagtggctcacacatgtaatcccagcactttgggaggccaaggcaggcgaatcacttgaggtcaagagttcgagaccagtcgggccaacatggcgaaaccctgtctctactaaaaatacaaaaatcagctgagcatggtggcaagtgcctgtaatcccagctcgggaggctaaggctagagaatcacctcaacctagaaggtggaggttgcagtgagccaggtccacgccacggcactctagcctgggtgacagagactttgtctcaaaaaaaaaaaaaaaagaaaagaaaagaaggccgggggcagtggctcacgcctgtaatcccagcactttgggaggccaaggcgggtagatcacgaggtcaggagatcgagaccatcctggctaacatggtgaaaccccgtctctactaaaaaatagaaaaaattagccaggcgtggtggcgggcgcctgtagtcccagctacccaggaggctgaggcaggagaatggcgtgaaccggcgaggcggagcttgcagtaagccgagatcatgccactgcactccagcctgggcgacagagcgagactccatctcaaaaaacaaaacaaaacaaaacaaacaaacaaacaaaaacaaaaagaaaagaaaaacatgtttgcaataatatgcacctagaacctgactattttgttcataaacacaaatttttttggctccaagaatgcaaggaccacgaaagtctgggctttgttttgtttgcaaattgcaaatgttgttcacaagtttggaaaatgatgtccccagaacctatgttgctgtctttgcctcaccagtgccctcctgtgcgttcgttggtgcttgttgctgtcagtacaacagcaccgtgacactctactgtgacgctaggacaggcaaagacacgggacaacctcatcatgtgtcctagtggggcatacccaagcattacccattgaaaacatggtttattgctgtgtaagttactctcactttccttctcctttgtactagttatggcatcatactattattttattttatttttttattttgtgatggagtcttgctctgtcgcccaggctggagtgcagtggctcgatctcggctcactgcaacctctgcctccagggttcaagcaattctcctgcctcagcctcctgagcaactgggactacaggaggtgccactatgcccagccagctaatttaaatatatatatatttttttattatttatttattttttattttattttattttattttttattttttttagtagagatggggtttcaccatgttggccggactggtctcgaactcctgacctcaggtgatcctcctgcctcggcttcccaacgtgctgggattacaggcatgagccatagcaccctgccccaatactattattttaaaataatctttgtaaatctgtgtaattacctctttcatcttgaattaggacaggtggcattgcaaaatattagtttttagaagtgggtactgggctgggcacacctatagtcccagcacttttggaggttgaggtaggaggattgcttgagaccaggagtttgagaccagcctgggcggcgtagtgagaccccatgtctacataaaaaaatttttaaagttgcgcatcctgatgcacacctgctgtcccacctactcaagaggcttaggagggaggatctcttgagcccaggaggtcaaggctgcagtgagctgtgatcatgccatagcactccagcctgggtgacagagcaagaaactgtctctcctccccccaccccaaaaaaaagtgggccctggaaaaaaaaatgccctacatctaatcaaacctttaaatcttacagcaattatggggatagagaaacatgctgcatgaaaccatgaggtaagtcgaaaagaatgtgagacatacctcaggaaaaatgacccattttttttgccctctaatggcttcaaacaagaggcaagggggatctgttacagaataaaagagacttaggaacaaacgaccggtagggcgtggtgactcatgtctgtaatcccgacacttcgggaggccgatgtgggcagatcactaaaggttaggagttcaagaccagcctggccaacatggtgaaaccccctcactactaaaaatacaaaaattagctgggcgtgttggtgggcacctgtaaactcagctactcaggaggctgagccaggagaatcgcttgaacccaggaggcggaggttgcagtgagccaagatcacgccactaccctccagcctggacaacagagtgagactccatctcaaaaaaaaaaaaaaaaaaaaaaagagaagcaaacaaccaaataccttgagtagatctttggatttcaatttgaagaaacaactattcctccttcccccagctctatcgcctggagtgcaggggcatgctcacagctcacggcagctttgatttcccggagtcaagagatcctcccatctcagcatcctaagtagctgggactataggcatgtgccacaacacctggccagaaacaactgtcaaaagaaaatttagggctgggtgccatggtgggcacctgtggtcccagctactcaggaggctgaggtgggagggtcaggagttcaagcccagcccaggcaaaataggaaaacccagtgtccaaaaaaaggttcaggcacaaacaggggatttgaatatttgaatatagactgggtattttttctgtttttgaggcagggtctcgctctgtcacctaggctggagtacagtggcataatcacggctcactgcagccttgaccatcccaggctaaaatgatcctcttgcctcagcctcccaagcagctgggactataggcagtcaccaccatgcccagctaattatttgtagacacaaagtttcaacatgttgcccaggctagtctcaatctcctgggctcaagccatccacctgccttggcctcccaaaatgctgggatcgccagcaggagcctctgcatctggcctggattggattttttttatatcaaatatttctgatttttttttaagtatgaacatgaaggttattaaaaaataaaaataaaagggccgggcgccatggctcacgcctgtaataccaacactttgggaggccaaggtgggcggatcacctgaggtcaggagttcgagaccagcctgacaaacatggagaaacccccctctctactaaaaatagaaaattagccgggtgtggtggtgcacgcctgtaatcccagctactcgggaggctgaggcaggagaatcacttgaacccaggaggcagaggttgaggtgagctgagatcctgccattgcactccagcctgggcaacaagagcgaaactccgtctcaaaaaaaaaaaaaaaaaaagtaagcctgttgtcagacatgtgtacccaaaacatttatgtatgaattgacataagcccgggatttgttttaaaatcatcctgaaaatatttttttgtgaaattgatcatcgttgatgataggtgatggatgtctgaatgttcttcatactattctctctacttttgtatatgtctgaaattttccatagcaaaaagtgaacccaaaataaagttgttaaaataaaatagatgagcatggtggtcatctactttcttctaaactacatggtgcaagtgtagtcttagctactcaggaggctgaggtaggaggctcacttgagcccaggagttcgagtccagcctgggcaacagagcaagaccctgtatctaaaaataaaattcatagtcgggtgcggtggctcacgcctgtaatcccagcactttgggagaccgaggcaagcggatcacgagatcaggagatcgagaccatcttggctagcacggtgaaaccccgtctctactaaaactacaaaaaattagctgggcctggtggcgggcgcctgtagtaccagctactcaggaggctgaggcaggagaatcacttgaacccaggaggtggaggttgcagtaagccaagatcgcgccattgcactccagcctaggcgacagagcgagactctgtctcaaaataaaataaaagtaaaaataaataaaataaaataaaatgaaataaagtgtgtcccagggcctagcacatagaaggtcttaaacaaatgttaattttctcctctgacctcaaagaaactagggcagcactttccatataattctctgcaatggtggaaaaattatctatctgctatgtccagtgtggtggctgagcactcaaaatgtgggtagtgggattgaagacctgaatttttgcctttgcttgactggattttgaaaaagaaaaaaaaaaaaaaaaaaagcgggccaggcatggtagctcacgcctgtaatcccagcactttgggagaccgaggtgggtggatcacctgaggtcaggagttcaagaccagactgaccaacatagtgaaacgctgtctctaataaaaatacaaaattagctgggtgtggtggcaggtgcctataatcccagctacttgggaggctaaggcaggagaatcttttgaacctgggaggaggaggttgcagtgtgccgagatggcgccactgcactccagcctgggtgacagagcgaggctccgtctcaaaaaaaaaaaaaaaaaaaaaagggcagggtcaggcacagtagctcacacttacaatcccagcactctgagaggttgatgctggaggattgcttaagcccaggagttcgagaccagcctgggcaacatggcaagaccccatctctaaaaagaaaagacctgaattttatttaattttaattaattaattaattattattataattttgttttttggttttttttttttaggcagagtctcgctctgtcacccaggctggagttcagtggcttgatctcagctcactgcaagctccgcctcccaggttcgcgccattctcctgcctcagcctcccgagtagctgggactacaggcgctcgccaccacgcccggctaatatttttttgtatttttagtagagacggggtttcaccatgttagccaggatggtctcgatctccgaaccttgggatccgcccccgtcggcctcccaaagtgctgggattataggcatgagccgccgcgcccagccaattttaattaatttaaatagcgacaggggctagtggataccacagtgaactatggagctctaatgacttggaatcagctggagaaatcatatatatatatatatatatatatatatatatatatatatatacacctatatatatatacctttatatatatatatacctttatatatatatacctttatatatatatatacctttatatatatacctttatatatatatacctttatatatatataccttcatatatatacatatatatatataccttcatatatatatatatacctttatatatatatacctttatatatacctttatatatatatatacctttatatatatacctttatatatatatacctttatatatatataccttcatatatatacatatatatatataccttcatatatatatatatatatacaccttcatatatatatatatatatatatatatatatatatatatacctttatatatatataaataactgagactttgtcaccagggatagagaagtggctgctactttgtaaattggacaggaaggtggccactataatctggagattaagcgatggggattagggatagagatgcttttgtgatgtggatcagatcaaatacagatgggtgaaagatgatacttcctaagcaggatgcaattattcagcaaactaatctgtgttgttcctgcccctggggacagagctgggagcaagaacaacaggtcctcctctcatgcactcacagcctatgagatgagcaaaagccaataatcaagtaaggaggctacgcatgcacaatggcttatggctgtaatcccagcattttgggaggccaaggcaggcagatcacttgagttcaggagtttgagaccagcctgggcaacatggcacaacctcacctttacaaaaaaattagccgggcgtggtgacatgcgcctgtggtcccagctactcaggaggctgagacaggagaatggcttgagcccaggaggtggaggttgcagtgagccaagattgtgccactgcactccagcctgggtaacagtgcgagactctgtctaaaaaaaaaaatagataaaaaaataaaattaaattaaattaaatttaaaaagaaattcaaaaataagaaaaattttacaggctaggtatagtggctcgcgcctgtaatgccagcagttttggagacccaggcgggaggatcacctgagtccaggatgttgagcctgcactgagccatgatggagacactgcactccagcctgagcaacggagcaagaccctgactcaaaaaaaagaaaataaagacaagtatcaaggcaatggtttgtagctagaaacacagagcatcctgacccaacggcaccaaggagggaaaagtattagacacatgctaatacttcagacaaagaatttgtttttttttttagacggagtttcgctctggttgtccaggcgagagtgcaatggcacgatctcgactcaccgcaacctccgcctcccgggttcaaacgattctcctgcctcagcctcccgaatagctgggattatagacatgccccaccacgcccggctaattttgtatttttagtagggatggggtttctccatgtttgtcagactggtctcaaactcctgacctcaggtgatacaccatccttggcctcccaaactgctgggatacaggcgtgagccaccacgcccggctgacaaagaattattatccccattgtaaagatgaagaaattgaggcttagagtttaaaatcttgcttaagttttgtagctctgagaggggagagaaagcctgtgtgggaagaagcagacaggaaaggccttctcagaacacgactggatctgaaaacccctcacctgtccacacctgaggcggctcctcttcctgctctcgctcagcctcctccaaaaaatcttccagaagcttctctgctttttgagcctcagcactccctggggccgcccagcccagaaaggttcggacactgcccaggtccgaatgggcagggtggtctcggaaatcctgagggtggtcctgcagccaggagcccagcactgacaccacagccctggccagagaggcagggtctcagagctgggtccagagtgggggacatagaatatgactcctggtaccttttttttttttttttttttgagatagagtcttactgtgtcaccaaggctgcagtgcaatggcctgatcttgactcactgcaacctcagcctcccgagtagctgggactacaggcatgcgccaccacacccagctacctttttttgttgttgttgtatttttagtagagacagggtttcgccatattggccaggatggtctctaactcctgacctccagtgatccacctgcctcggcctcccaaagtgttgggattacaggcatgagccaccacgccccacctgactcccagtctcttattacccaacctgcaattttcaaaaccccagtccgactgctaacctttgacctcttggatttccctccccgcactcccctatctggatgaaggacccacctcaggttcttgttgaagctcagatcttgtaccgctgtcttcttgatctctaccctgggaagaggccccccagcaggtgaagaagggggaacctagagggggcttaggaagagggctctgggtctgggaggtgtttccaggttccacacctgaggaggtggaggggggtgcccagttggggttctagggtggagaatacggaggttatggttcgctactgacccgggaggtgggggcggtggcattggtggcagcagaaagcccagcaggcaggcagtgggtacaaaggtccggtaggtggccaggaaggcgggcatgaagctggggtcctgctcacggtctccaaacaccaactctcccaccagccgctccaggcgcgctgccctcagcaccctcaccttgctggttcgatagtggaggaaggtattggcaatggggctgggagcctgcaggaggggagaggtggccatgagagagcaggagtggtcctcacagcaccccttctctagtcacattcatcactagcaccactctttttttttttgtttttttttttgagacagagtctcactctgttgcccaggctggagtgcagtggcacgatcttgggtcacttcaacttctgcctcctgggttcaagcaatcctccttcctcagcctccaagtagctgaaactacaggcgcacaccaccaagcccagctaatttttgtatttttgtagagatagggtttcaccatgttggtcagactggtctcgaactcctgacctcaagtaatctgccccccttggcctcccaaagtctcccaaagggctaggattacaggcgtgaaccaccgtgcccagcccctagcaccacttttttttttttttttttgagacagaatctcactctgtcacctaggctggagttcagtggcgtgatcttggctcactgcaacctccgcctcctgggttcaagcaattctctgcctcagcctcccaagtatctgggattacaggcacccgccaccaagcccagctagttttttcgtatttttagtagagacggtgtttcaccgtcttggccaggttggtcttgaactcctgacctgatgatccacttgcctcggcctcccaaagtgctgggattacaggcgtgagccacctcgccccgcctgtagcaccattctttcatgtgattcctctgtctcccggcttcttggagttattgttttggtttgttttttttagaaacaggtcttgttttgttgcccaggctggggtgcagtggcacaatcatagctcactgcagcctccaagtcctagactcaagcggtccctctgccccagcctcctgagtagctgggaccactgctgggcatcatcacgcacagctagttttttaatttttatttttattagagagaatcttgctgtgttgtccaggctggtctccaattcctggccttctgccttggtctctcgaagcgcagggattataggtgtgtgccccactccctgcccgcttgaagttattgttcctccccatccacaaatagctcctgcaacttgccctggaaaccctccctctcccatgccctgtcccctactccctctcccgtcccctccccctcccgtcccctccccccacccccccgcccccgccccacacactcttttccacccagggcttccctcagccctcctgtcgcgcttcactggctgccccatccgccctcacctagccacttctaaaccaaccccattccaccttccagccccggccctctaaacctgcctttcccaactctgccgtccagttctgtccttaccaagttgtccctaggctcctctcgggaactgcgcggccatcgcctggccccaccccattccctggatctccccccacttacctggccgcccccagtcccctttctacctggtcgcctcatctggtcgcctccgagcccctcccttccttccgcccactgcacctggcggcctgtgctcggctctccagctccgccctcaactggtcgcttccggccccgcgccacccaccaaaccccctcctcacctggctgcccccggggccctccgccgggctcctgcgctgactgcgctgccgccgcagggagacactgtacaccgcgccgtcctcggtctcttcaccccagtcctgcagcggtgcctggacgcacaggcggactcagggcaccaaaggggcacaggtcctggggcctcagcctccttggccgctcggactcgggccgagtcctcctgctgcatccccacgccccttcccggccagaagctgcgagactagggctggggtcccaggctagtcccctcctcgctgcgggtcccctcctcccaggtcctgaggacatggggtggcatttggggatgtcccagggcccagtctaatagaacctgtctctagctctttctgccgactgcgctcagagactcgcgcccccatccctaagaggaaccagtcgcttcactgggtcaagggccgcgagtccccaggaggggactccagggcaagttcagattgggagcagataccgtccgacgggcgggcgcttggagtttctggacctgcgggtcaccagggatgcggggtccggggatcccttgtccccttaccagggccagctctttgcctgctgtgcgctccatggccggcgcccgtccctctcagtggcgccgctgagtgaggcggaagggccggcgggtggcgggtggcgggcggcgggcagtggccgggcgctgaggccagaggggcggagcggccgagctgctggggcggggcggggcagggcaggccggacccagcctctgggtgcctccagccggacccagcgccagcccaggagaggtcctggctcttccgctgggtgcctatcaatctgtccccagaagaaaggacatatctgtccccaaggggtcttttttgtatccccagatgtgggggagctcctgtgtgggggcatgtgtgtgtccccagaccagagtcctctgtcctccagtggaaggggctagcttgatcaagtgtgggggcatcttccactttttattattattgctattattttgagatggagtctcgttctgtcacccatgctggagtacagtggcttgatcttaactcactgcaacctccgcctcccagattcaaaggattcttgtgcctcagcctcccaagtagctaggattacaggtgccgccaccatgctcagctaatttttgtattttttgtagaggcggggttttgccatacttgccaggctggtctcaaactcctggcctcaagagattcgcccacctcagcctcccaaaatgctgggattacaggcatgaaccacggcgcccagccttattattttttagagacagggtctcactcctgttgccaaggctgcagtgcagtggcttgatcttggctcactgcaatctccgcctcctgggttcaatccattctcctgcctcagtctcccaagtagctgggactacaggcatatgccaccatgctcagcttttttttttttttttttttttttttttttttttttggtaaaaactggttttcaccatgttgcccaggctagtctggaacccctgggctcaagcgacacacccagctcagcctcccaaagtgctgggaatataggtatgaatgagccactgcaccccgcccttattttatttattgagacagggtctggctctgtggcccaggctggagtgcagtagcacgatcatagctcactgcagcctggagctcctggactcaagtgatcctcccaactcagcctcccaaaatactgggattacaggcataaaaccactacatcgggccatctcccatttttaagctccatctgcgtcactagctgatgggagtcatcatgacccaggttggaggaggcagtctgtggccctgggttttcagggacagccgtctcttgggtggtgcagggtcaaaaacagatgaatacccaggggcatggtcggtaacatttattgcgcaactctgaggccggggcggacccagctggggagatttactgtgggaacgtctggcccggccccttcctcccctccgggcgccgctggccgcctccgttcccggtccgggccgcgttcagcccctgaaggggccccgtggggcctgcgctagacccggagggatcgggggctccgaagggggccgcctggtgggtgtcaggacgagtctaggacctccgagagcgacggtgcttcttgtgactttcgattaatttctgggaacggatcttgagtgatgcgcgggtcactacctcgttgtcctcctcctcactctcttcgtctaaggggggtggggggatgagcagggagcgatgtgggatccaggtccccatccctggctccccttccctttaccaccccactccacccccaccttggccctgaacagggtatctgacaacctcctgctacccagcttggggccccaaccgcaccccttcatccccccacccatactgaccaaaaaacttgtccttggaagtggcaaggggcagggcgatgcgggtgttgtattcgggcagccttccctctaagctggcgaggaactaagcggggatgggaagcgagagaggaaggtgggcggggccaggggccaccgagaagtcacgttccccctcctccctaccccattccgagatatgccctagttccaactggagaccactgcccactcccatccctccttaagcaggcaccttgatacccagcttcaccccctcatcactcaggtccgcccctggtctctggggccctgccactaggcctctccccatccggataccccagccgcgtcctctagcctcacaggacccgcctgcacctcttctggtttcttccctcgtggctcgggctcacccctggctcgtcaaacctcgcccgttgtccccgagaccccttcctggctgatcagcctgcaatctggtctcccgaagttgcccccggttccctggttttccgacccagccctactcctagatctctggagctctgccccatggctgcagggcacctcgcggttagcgatgtggcacagcatctcctgcacgtcgtggccctggagctgcgcctgcagtttcagcagcttttcctccacgaggcccagcaggtttggcacatagttatctgcctggggatccagctcctttcccgcgaagcggccgtcctcctgcggccagggtagagccgggtcagccgagaggggtggggcctcttggaaggctccacccaggggcggggcttttctttcgggggcggggcctaggaggtaagggcccacctgcagggtcgatcctagccattgggggcggggacttaggtcaaggccacgtctgtgatgggggagcctctgaactctaactctatatgtaaaggtttcggggaggcctcttgggaacagtaaggattcgagggaggccattgtgggatggcctcctgaagaaatggccctctgctgcgggcaggataggtcttctgtctcgggctgctccagaactgcagataggtctccgagcttttcggggacagggtgggacttctttcccttggaggcggagcttgagacgggacagggtctctgacgtcttgggcttccttggggagtgagagcttccccagggaggtggggcggggactctgaggaatggggtggggcttcccctgtgggcggggcctctgacgtccgggacagaggatgtggcaggccacgttccctcgggcaagctggtgtggcaggaaccccgcttcgtggctgcgcctctgcggtcccaggagggcctgtcggggcttcccctgggcggggcctaccacagtgatgtggatcagcttgctggccaggtgctccaggctgtccttggccacttgcatcgcccgcaaggcgcgctccagctggtccttggcctcggcgtgccgccgctcctccttcttgagacgctcctgcgcctcggcttgcagtttctgctggctgcagggagccgggaggtcaccccgggggctcagcccgccccgccgccctccccagagccccggtgcctcacctcaccagcgtggcctcccccgagtacttgaggtcttccagctcccgctgcagttgttgcttctcctgcttcagcctcaccaacgtctgctcgttctcgctcttgagcgtctccaactgcgcgaaggtgtcgccctgggccaggaaccgccgcaccaacgactgcgggccacccagccccagtcagagccagggcctagggagcgtaggggcgctccacctcctctcccccaccctgcgaaccctcgcacgcaggacaggtggcctgagctggcgccttttgcacagcaatgtatggggacactgtgggttggacgcagggttgcttcaagggtgagcagccctggatatatcatttttgcggggccctttctggcctatataaggaatttgagtcagcccaaactcgggggcaactggagaggcgagcatagcttctttccaaaatcaaagtgccatcaatttctggccgtgaatctcgcccgattccgcaggaaataccgcccgtcttcggagccatccgctcacaaggcccacatctggaaaggggctgcgcctcagtgccccagatgaccccataggtgtactcctataggtgggagtcccggaagtcatcaggggtcggccccatcggaggagcagcaggttggcggacacccagaggggagaaacagggttggggtccagtgttcaccggcgggaaccaggacccaagggggacacagcggtcttagaataatgcaaggaagactttacagtgagggacccggcgcagggaccccacttgccaggatctgaggatggtactgggcggtccactgggtcccagaccatgttacagacactggagacagaacaagagacgaaactcccagttctcctagagctggcatggcaaaggagttagcatggtgcaagagagaacggaaggcgagtgtagaaatgacggcgagtgtagacagctcctaggggttttgctgcgaagggcagcagaaaaactgaacggtagctggagggggaagggatgtttttcaagaaaggagcaggtttgtgagctgaataaccgacctggcagagaggggagacagggtgtgtcggtttcaccggcttaggcacccctggggcccgtctggggtggggggggggcgcggcggagagggctgcgggcagaactcacgtgcgtctcgtcagtgccagtggcgtccttgaccttgccaaagatcacctccatctggtacatgctccagcgctgccgcagctcctcctccttggcatgcaggctgtcctggatggtgtcgtcggactgtagcagcaggtgctcgcggtgggtctgctcgtgggttgaggtcagagccagggtcagctggtggacagcgcttgggaaggaggccggggagggggatccagataggggcccgcgaggaacagggctcaaactggagggaagggagagggcaaaagcttggggccagataaaggcacccgggcaggtgtcaagaaagtgggacaaggtcgggcgcgggggcggtggctgtggctcacgcctttaattccagtactttaggaggctgaggcgggaggattgtttgagcccaggggttcgggaccagcttggacaacacggcgagaccccgtctctacaaaaaacaccaaaattagcagggcgtggtggggcgcctgaagtcccagctacttgggaggctgaggtgagaggatcacttgagcccaggaggtcgagactgcagtgagctataattagtctgagcgacagagaccgtgtctcaaaaaaaaatccatatatatatgtatatatgtatatatatgtatatatgtatatatgtgtatatatacctatgtgtatatatgtatatatgtgtatatatacctatgtgtataaatatatatgtgtatatatacctatgtgtatatatgtatatatgtgtatatatacctatgtgtatatatgtatatatgtgtatatatacctatgtgtatatatgtatatatgtgtatatatacctatgtgtatatatgtatatatgtgtatatatacctatgtgtatatatgtatatatgtgtatatatacctatgtgtatatatgtatatatgtgtatatatacctatgtgtatatatgtatatatgtgtatatatacctatgtgtatatatgtatatatgtgtatatatacctatgtgtatatatgtatatatgtgtatatgtacctatgtgtatatatgtatatatgtgtatatgtacatatgtgtatatatgtatatatgtgtatatgtacatatgtgtatatgtatatatgtgtatatatacatatgtgcatatatacatatgtgtatatatgtgtatatgtgtatatatgtatatgtgtatatgtacatatgtgtatatatgtatatatgtgtatatgtacatatgtgtatatgtgtatatgtacatatgtatatatacatatgtgtatatgtacatatgtgtatatatacatatgtgtatgtgtacatatgtgtatatatgtgtgtatatgtacatatgtgtatatatgtatatgtacatatgtgtatatgtgtgtatatgtacatatgtgtatatatgtgtatgtgtacatatgtgtatatgtacatatgtgtatatatgtatatatgtgtatatgtacatatgtgtatatatgtgtgtatgtacatatgtgtatatgtatatatacatatatgtgtatatacacatatgtgtatatgtatatatacatatatgtgtgtgtatatatgtatatatgtgtgtatatatgtatatatgtatatatgtgtgtatatatgtatatatgtatatatgtgtgtatgtatgtatatatgtatatatgtgtgtatgtatgtatatatgtatgtatatgtgtatatatgtgtgtgtatatatgcatatatgcatatatgtatatatatgtatatacgtatatatatatatatatatgcaaaaaaaacctatcaaacaacaactacaacaacaacaacccaaaaaacaaaaaggcaggacagggctttggtgagggctggatgggaggcagcctcagggcaggtgcaggggcggggccaagagtgagggggcagggccttaggcaacggttggctcagaggcacggtcagattcaggacaggcagtctagtcaggtgggaaaggatgggtaggggggtcactgagtaaggggaaggctggaggccatgtcagagccaaaatggtgcagtcgcttaggaggggaggggaggagaggcggggtcagggatgtgggaggggtcttcgcaccaagtgggggtggagtcagagagggggcggggttaggagaaacagaaaatgggagaaggcctaggatgagggagagccagggcatggctggtttgtgctgggctgggctggagtcacaggcgcgcacccctgggtgcgcccaccttgcgctccatgcgctcgttctccagtttcttctcctcggcgcgcttcttgcactcacttatgtagcgttcccgcttcttgcgctctcgaaccaaggtctcctctaggtactgcagctggttctggagggcgggcagggtagcagggagaccagctggcacctaccactgcccgccgcagggtgctgggagatagatgggggcgggggcgtaggggaagctcagggacagctgaggtcagattctcaagctgggagaccgcggcagctgggcaggatggccgagggcaagaggggtggcaccttggcaatgtcccgggcattgagggcctcttggttcaccacgtgcagtgcctccagctcatgtttggtcctcaccacctcagcctccatggagtccagccggttctccaagttgaggctctcgtcctggggcgtggtggggaggggtagcggagatggtgcaggtctgtgactgctgtccctagccaagcccgccctccctgtttgtcatctcacccgagccctcctagtccctaccattagataggccttgagctgcaggtacacgctggtaatgtgctcggcctcctgcgccttcatctgggccttctccaggcggttctccaggttccgcatggtctggagagcagcagggctgggctgagggccctccgcactcaatccctcccacacgaccctctgccctgcaggcctcacccgcccctaccttggccacctccgtgtgtctgttttgcgcctccgccatctccagaaggcgcaggctgtgctgcagctggagctcctccagccgcctctgccgcaacaccacctggtgccgcagggcgttctgctgcttcaccttctccctcagccggtggtctaggtgctccagggcctgccgcaaggaggggagcgaaagcaggagcctcaacaccctaccccgacacacacctagcccttcctcccttccttctcccacactgtggcttccaggactcccctctcccgttttctacccacctccctggccaccccttctgtgttgtttttgtagagagagcaccggagtcttctctctgtctatatcgaccaccttggcgatcttacaccggctcagggttctaaaaaaatatttttaaatttttctttctttcgtttttttttttttagacggagtcttgctctgacacccaggctggagtgctgtggtgcaatctcggctcactgcaacctcctcctcctgggttcacgccattctcctgcctcaacctcccgagtagctgggattacaggtgcccaccaccacgcctggctaatttttgtttttgttttcttttcttttttttttttttttgaaacggagtctcgctctgtcgcccaggctgaagtgtagtggcacgatctcggctcactgcaacttccatctcctaggttcaagcaattctcctgcctcagcctcccaagtagctgggattacaggcatgtgccactacacccggctaatttttgtattttgggtagagacagggtttcaccacgttgaccaggctggtctcaaacgcctgacttcaggtgatccacctgcctcggcctccgaaagtgctgggattacagacgtgagccacctcacccagctatcttctggccatttttttcttttaaaaaatgttttaggctgggcgcggtggctcccgcctgtaatcccagcactttgggaggccaaggcgggtggatcacgaggtcaggacatcgagaccatcctggctaacacggtaaaaccccgtctctactaaaaatacaaaaaattagccgggcatggtggcaggcgcctgtagtcccagctactcaggaggctgaggcagaagaatggcgagaacccgggaggcggagcttgcagtgagccaagatcgtgccactgcactccatactgggcgacagtgcgagactctgtctcaaaaaaaaaaaaaaattatagaggcagggtctcgctatgtggctcaggctggtcgcgaattcctgggcccaagccatcctccttcctcggcctcccaaagtgctgagattacaggcaagagccactgcacccagcccagttttgttttgttttgttttttgagatggggtctcaccctgtcactcaggctggagtgcagtggctcgatcttggctcactgcaacctccgccccttgagctcaagtgatccttcctcctcagcgtcctcagttgctgggaccacagatgcatgccacgacgcctgggtacgtttttgtatttttggtagagacagggtttcatcatgttgcccaggctggtcatgaacttctgagctcaagtgatccacctgccttggcctcccaaagtactaggattacagacgtgagccatcacgcccagccttttaatttttataattattttttcagacaaggccttgctttgtcacccggacgggagtgcagtggcacgaacatgactcactgcagcctcgacctccccagttcaggtgatcctcccacctcagcctggcaagtagctgggactacaatcctgtgccaccacatttggcaaatcttctgtatttgttgtagagtcaaagtttcactatgttggcaggctggtctcaaactcttgggctcaagtgatcctccagccttggcctcccaaagtgctggtattacaaggcatgagccaccatgcctagactgtgttttattttttatttatttatttatttatttatttatttatttatttattttgagacagagttgcccaggctggagtgcaatggcatgatctcggctcacagcaacctccacctcccgggttcaagggattctcctgcgtcagcctcctgagtagctgggattacaagcatgcaccaccatgcccggctaattttttgtatttttagtagagacggggtttcgccatgttggccaggctggtctcaaacgcccgacctcaggtgatccgcccgcctcagcctcccaaagtgctgggattacaggcgtgagccaccgcgcccggcctttaattttttatcttttgtttttgtttgtttgtttgtttttgtttttttgagacagagtctcgctctgtcacccaggttggagtgcagtggcaccagtctcagctcactgcaagctccgcctcccgggttcaaactgttctcctgcctcagactcctgagtagctgggactacaggcgcccaccaccatgcctggctaattttttgtatttttatttttattttattttttatttatgtatttatttttgagacagagtctcactctgtcgcccagactggagtgcagtggtgcgatctcagctcactgcaacttctgcctcttgggttcaagcaattctgtgcctcagcctcctgagtagctgggattacaggtgcctgccaccacacctggctaatttttgtatttttagtaaaaacagggtttcaccatcttggccaggctggtctagaactcctgaccttgtgatccacccacctcggcctcccaaagtgctgggattacaggcatgagccaccgcgcccggccttttgtatttttagtagagacggggtttcaccgtgttagccaggatgggctcgatctcctgacctcgtgatccacccgcctcggtttcccaaagtgctgggattacgggcgtgagccaccgcgcccagccttttttttttttttttttaaagaaacaggttgtactgtcactcaggctggagtgcagtggtgcaattgtggctcattatagtctcaaacttctaggctcatgcaatcctccagcctcagcctcctgaatagctgggattacaggcatgtgccactggtcattgttttcgtttgtttgttttgagactgagtctcactctgtctcccaggctggagcacagtggcacaacctcagcttactacaacctctgcctcttgggttcaatgacttttaaaatgttttattttttttaattatttttattttatttattttttgagacggagtttcgctcttgttgcccaggctggagtgtaatggcacaatctcggctcactgcaacctctgcctcccgggttcaagcgattctcctgcctcagcctcccgagtagctgggattacaggcacgtgccatcatgcccagctaagttttgtatttttagtagagacagggtttctccatgttggtcaggttggtcttgaactcccgacttcaggtcatctgcccgccttggcctcccaaagtgctgtgattacagacgtgggccaccgcgcctggctgtgatgtttttttttttaacttgttttccctattaggatatgagctgtttttagaagtggagacttggtctgctttttcactgcatttactaccatgccaggatgccagatacaaggaaagtgagtaataaagatttaattgaatgagcacatgaatggcagctagtgtgcaggaaggattggagagggtgagcctggagtccagtggtgaggggacccaggctggaaatgaaggaggaggtggggcgagggtgggcaaacctgtcctgtcctgttcttcaggtatggcttctcccacttccattcgcgaatcactgcctggaccactttctcatctccctgcaaggagggaagtccagtcacctttcagcatgccacctccagctaaggccaggtgctacctacttgtcccccaccatccaccgccacgggaaccctacacccacccctttgccccttaccttgagcaggtccagcagctttagttccagtgccttagtctccttgcggagctgactgatggtctcctggttcttcttgatgttccactgagagctctcaaaaaaagccttccggtcaccctctggcaggcaggtgaggtggacagacacacagttactgggtgggtgcatgggtgcaacatcccagaggaaagaccttttttgcaatcatcaactttttttttttttttgagatggagtttcactcttgttgcccaggctgcagtgcaatggtgcaatctcggctcaccacagcctccgcctcccgggttcaagagattctcctgcttcagcctcccaagtagctgggattacaggcatgtaccaccacacctggctaattttgtatttttagtagacatggggtttctccatgttggtcaggctggtctcgaactcctgacctcaggtgttcccaaagttctaggccccctaaagtcctaggattataggtgtgagccactgtgccaggctcatcaacttaatattataagaatgcagtcgttgaccagcctggccaacatggtaaaaccgcatctctactaaaaatacaaaaattagccaggtgtgaggctgagcatgatggctcgttcctgtaatccttgcactttgggaggtagaggcgggcggatcacctgaggtcaagagttcaagatcagcctggccaacatggtgaaaccccatctctacaaaaatacaaaaattagctgggcatggccgggcacggtggctcacgtccataatcccagcactttgggaggccaaagtgagcggatcacgaggtcaggagatcgagaccatcctggctaacatagtgaaatcccgcctctactaaaaatacaaaaaaaaaaaaaaattagccgtgcatggtggcaggcacctgtagtcccagctactcaggggactgaggcaggagaatggtgtgaacctgggaggcagagcttgcagtgagccgagatcgcaccactgcactccagcctgggtgacagagcgagactctgcctcaaaaaaaaaaaaaaaaaaaaattagccgggcatgatggtgggtgcctgtaatcccagctacaggaggctgaggcacaataattacttgacctctggaggtggaggttgcattgagctgagatcctgccactgcactccagcctgggcaacagagcaagactctgtctcaaaaaacaaaacaaaacaaaacaaaaaaccccaaaatccttccatactcaagtcccacagtcagccctgtggaacctgcagatacaaacagttgtccctctgtatactcaggttttgcattccaggactgttgtattttcttttcttttcttttttgggactgggtcttgctctgtcacccagaatgaagtgcagtggtgctatcactgctcactgaagcctcaacctcctgagctcaagcagtcctcctgcctcagcctcccaagtagctaggactagaggcatgtgccaccacatctggctactttattttttgtagagtcaaggatctcactatgttgcccaggctggtctcgaactcctggcctctagcaatcctcctgcctcagcctcccaaagtgctgggattacaggtatgaaccactgtgcccggcctgcccatctcaattttttttaacttgaaaggatgaatgatatatgtgaacacatggtgttcaacggtcaactgtacttcactgtgagcatttattatgtgttggatgctggactaagaggtttccgaatgccatatatcacgtgccaataggtatccatggcatacgcatatcataccccttgcacagatgacaagacagaggcttgggctgattaaactgcttaaggtcacaagcaaccatgcaagattacccttttttttttttaagacggaatctcactctgtcacccaggctggagtgcagtggcgcaatcctggctcaccgcaacctccacctcctgggttcaagcccctctcctgcctcagccttccaagtagctgggattacaggcgtgcgccaccatgcccggctaatttttgtacttttagtagagatggggtttcactatgttggccaggctggtctcaaactcctgacctcaaatgatccgcccacctcagcctcccaaagtgctgggattacaggtgtgagccacctcgcccagccatgattacctcttaataatatcaacaaaagcaataataatagcttacacacaaggattctgcaacctcaggatgaccaacaactgggccgaataattatttgccgtggggtgctctcctgtgttttgcagaatgttgggcagcatcttcaactctgcccactagatgccagtggcagacacacacccacaacagacatccatgccaccatgcccggctaattttttgtatttttagtagagacagcgtttcaccgtgttggccatgctggtctcaatgtcttaggacattgccaaatggcccctgtggggcaaaccaacccttttccaacaagaaccactggtttacaccttatggtactttgctatgtgccaggcactgttctaagcactttacacatttcaggtacctatgttgtactgttactatccccatttcacacatcgagaaactgagaacaattaggttactcttagtcccccaaggttggacaactattatgcagagccaggattccaacccagaaaatctggctctaaaaatctatgctcaggccaggtgcagcggcccatgcctgtaaccccagcactttgggaggctgaggaggaaggattgcttgagcccaggagtttgagaccagcctgggcagcatagtgagaccccatctctacaaaaagtaagaaaattagccaagcacagtggtgtatgcctgtagtcccagctactcaggaggctgaggtggaaggatcgcttgagcctaggaggtcaagtctgcagtgaactgttatccaaccactacactccagcctcaacagcagagcaagaccctgtcagaaagaaagaaggctgggcgcggtggctcacacatgtaatcccagcactttgggagccaaggccgtggatcacttgagatcaggagttcgagaccagcctggccaacatggtgaaacccagtctctactaaaaatataaaaattaggtgtggtggcacgcacctatagtcccagctagtcaggaggctgaggctcgagaatcgcttgaaccttggaggcagaggttgcagtgagccgagatcatgccactgctctccagcctaggcgacagagcaagaccctgtctcaaaaaacaaaaaacaaaacaaaaaaaaacgcgggtgcagtggctcacgcctgtaatcccagcagtttgggaggccgaggcgggctcacgcctgtaatcccagcagtttgggaggtcaagagattgagaccaccctggccaatatggtgaaatccctctgtactaaaaatacaaaaattagttaggcgtggtggcgtgtgcctgtagtcccagctactcaagaggctgaggcaggagaatcgcttgaacccgggaggcggaggttgcagtgagccgaaatcgttccactgcactcccacctggcaacagagtgagattctgccaaaaaaaaaaaaaaaaatagagaaaataaattacaagaaagtatgaagtacagttcagtcggttctgaacccatgagaagttttaagagacagagaaggaaaaacatgaactaagtatgagtttttgcccagaaacggtttacctagactcatgctggagaaatacctttgtcacaccatgaagattggatgggcactgttgacccctgaccctctgtaccctctggagccatcttacctaacagttgtatctttttatgtaactcagccacctgagagtgcacagagggcttccctgcacctctgtggaaggatcctcccttggaacggcctggggtccacgcctgggctgtgcccttgcctcggaggtggctgggtttgcccgaagcctccctgcccttgaccctggaagagggcgtcgaagcctggtcctgaggaggcagggcgttggcggaggccgccctgcacagaggagatgtcatgatggggttggggctgaaggcccctaggggttagggggataactaggagtcagtcgcccctgtcagggatccgtcagctcggattcctagggctctgaaaaatgcactttccgaccgctaggtggttgcgctccgcatctctcggttgccaggtaaccgcctccccgtctctctccactgtttccatggagatcacccgcgttccgtggctgacactgcgttctcattggctgaggctgcatagaggggcggtcccaacagtgggcggggtagagccgcgccgcaggacggagggtctggacactttggggtcacgtgctcattccgtttccctacctcccccaaccttatcccgcccctgggggttcgcgggcatttttcaggaactttctttccggcttgagaagccgccactcccaagatggaggtacgctgcgccgccattaagagctagccctcagaactatcctctctaaggtttcacagtcctgcccaagatggccgtctcggctctggcaccgcccccactcctgcctctcccaacatggcgaccctgagtctccgttcccggtgcggaacgtacgaccggaagtgacggggtccagaaatttccgctttctttctgcagcaggaaccgcggctgctggacaagaggggtgcggtggatactgacctttgctccggcctcgtgtaggtgtgaacgagcgggtgggagggcacctcagtttcttacagggggcaaccggagggtgcatgtgtgggtgtggacggcggaggctgttaatccctttggtctgttggcgggaattgggtcacaattgggcacagggagcggaggttttgagatcttgagatcctcgccattgatttgagcaaagtgagactggccaggattggggagatcgctgcccctcgcccccatatcggaaacaaagtgaggcctcattgcctggaagcgatggaggaatccaattggctggaagtagccctctcccactgaccgggatccgctttcttcctgcagcgtgaagacacagcgcatctccccgctgtaggcttcctcccacagaacccgtttcgggcctcagagcgtctggtgagatgctgttgccgctgctgctgctgctacccatgtgctgggccgtggaggtcaagaggccccggggcgtctccctcaccagtgagtcctcctgttcaccctcccgccaggctggaggtgggaggggccaacattgggccttagggataggcatttacagccttttgactcagtttcccggtagtgctccgctggtggggatgggaggacagaggtggtatttggtggagaaggcgcttacctgccctgggctgagcttcctgtaccccgcagatcatcacttctacgatgagtccaagcctttcacctgcctggacggttcggccaccatcccatttgatcaggtcaacgatgactattgcgactgcaaagatggctctgacgagccaggtgagccttttctctgttcatccatcagatgtttattgaacactgctcagtgccaggccctgtctgtgtgaccaagatactacctctgctggctcccctttgagtgggcagaaacaagctcagaagtcagtggtcagtgttatggccccgggcagctggaggagcccagagtcgtcctcctcccaagcctcggggtcagagaaggctcctccaaggaggtgaggtttcagttgaatcccgaaggtgctgcagatggaggggtcaacacgggcaaacccctagaagtgggagacagggtggggccaagagcaatccagcaggagacagaggtgaagggagaccctggctttttgtttttgtgtgttttgaagagacagggtcttgctttgttgctgaggctggagtacagtggcatgatcgtagctcactgcagcctggaactcttgggctcaagtcatcctcctgccttggcctcccaaagtgctggggttacaggtgtgagccaccgtgcctggatgagaccgtgtctttggttttgtttttgttttgagacggagtcttgctctgtttcccaggctggagtgcagtggcgccatctcggctcactgcaagctccgcctcccgggttcacaccgttctcctgcctcagcctcctgagtagctgggactacaggcacccaccaccacgcccagctagtttttttttgtatttttagtagatacagggtttcactgtgttagccaggatggtctcgatctcgtcaccttgtgatccacccgcctcggcctcccaaagtgttgggattacaggcgtgagccaccgtacctggccttgttttgttttgtttttaatttttttttttgagatggagtttcactcttatcgcccaggctggagtgcagtggcatgatcttggctcactgcagtctccacctcccgggttcaagcgattctcctgcctcagcctcctgagtagctgggattacaggcacatgccaccacatccggctaatttttcgtatttttagtagagatggagtttcatcgtgttggccaggctggtctcaaactcatcacctcaggtgacccacccgcctcggcctcccaaagtgctgggattacaggtgtgagcccccgtgccaggtggagaccctgttttgaagggcctcagtgagaagaggcaggaggcggcactggagagctttatttcgagccctggctgtgcagtgtacaactctttccttcctttggtttcctttcctttcttgtgctgtgtgcagtgtgggtcaggggctcttatctgtggatggatgggacatgtctgtccctgagctgactccgaaaaccttccctcccttcttcctcacaggcacggctgcctgtcctaatggcagcttccactgcaccaacactggctataagcccctgtatatcccctccaaccgggtcaacgatggtgtttgtggtaagtgaagatgcaccaggattctggaaaggtggtagagggagggagggaggaggcactgccaggtctgatcttggcttctgcctctgccacagactgctgcgatggaacagacgagtacaacagcggcgtcatctgtgagaacacctgcaagtacgtgggtgacagtacccctcccatcaccccaccccaagactttgcctggctccacccagtgaatcgggcccactctctcttctgcttttctgtatcgggttctctgtctgtgccaggtgccttgtgaatcctaatccccacctttccctctagtctggaagcaggtaggattgtttcccgattcaacagatgggggaactcaagtttagaaagggaaatgacttccccagggtcacataggagatagcagagccggcacttggactctaaactttccattgtcacgctctgcagcaggtcctgaaaaccgaaacacccacaggcaggtaaagtatacaacggaaggaggccaggcgcggtggctcacacctgtaatcccagcactttgggaggctgaggcaggcggatcacgaggtcaggagatcgagaccatcctggctgacatggtgaaactccgtctcactaaaaatacaaaaaattagctgggtgtggtggcgggcgcctgtagtcccagctactcggtgggctgaggcaggtgagtggcgtgaacacgggaggcagaggttgcagtgagccgagatcgcaccactgcaatccagcctgggcaacagagtgagactccgtctcaaaaaaaaagcaaaaaaaaaaaaagcatacaacagaaggaggccaagtatgaggcaatacggaggggtggggattgtggcatctaggggaacagctgttctcaattcctgccagctgatccttttgtagttcataggcatgatgatttatttttatttatttatattttttgagacagggtctcactctgtcgcccaggctggagtgcagtggcgtgatcttggctcactgcaacctctgcccttcgggttcaagcaattctcacacctcagcctcccaagtagctgggaatacaggcgtacccccaccacgcctggctaacttttgtatttttggtagagatggtttcactatgttggccaggctggcctcgaacgcctgacctcaggtgatctgctcgcctcagcctcccaaagtgctaagccgccgcgcttggccacgatgattaggtttttatgcacgtgtgagagatacgcctcccttaaaccttgttgcgaccttggcgcattacctgtctgatatgaaaaaataagacccggctcatggtggctcctgcctgtaatcccagcattttgggaggctgaggcaggaagactgcttgagcccaggagtttgagaccagcctgggcaaaatagcgataccctatctctataaaaagtaaaaaaaaaaaattaaaaagtaaaaataaaaattggaaattataatttaaaaaattactggttgggcatgtggctcacacctgtaatcccagcactttgggaggctaaggcgagaggatcaccttaacccaggagtttgagaccagcctgggcaacacagtgagacccgtctcagaaaaatttttcttttctttttttttttttttttttttttttttgtgagacagagtctcactctgttgcccaggctggatggagtgcagtggcgcgatctcggctcactctaacctctgcctcccgggttcaagcgattcttctgccttagcctcctgagtagctgggactacaggcatccaccaccacacccggctaaaatttgtatttttagtagagacggtgtttcacaatattggccaggctggtctcgaactcctgacctcatgatccacctgccttggcctcccaaagtgcggggattacagatgtgagccaccatgcccggctgaaaatttgttaaaaaattagccgggtgtgttggtgcgtgtctgtagtcgcaggtactcaggaggctgaggcaggaagattgcttgggcctgggaagcagaggttgcagtgagctaaaaagtaaaaaaaaaacaaaaaaaacacaaagtcctatcagttgttggcagatggtgtaaaactctctggattccacatcttttaaatagaaggtggattgaacacaaccaacacacttctttttttttttgagacggagtctcactctgtcgcccaggctggagtgcagtggtgtgatctccgctcactgcaagctccgcttcccgagttcatgccattctcctgcctcagcctcccgagtagctgggactacaggcacctgccgctacacctggctaatttttttttttgtatttttagtagagatggggtttcaccgtgttagcccggatggtctcgatctcctgaccttgtgatctgcccgcctcggtctcccaaagtgctgggattacaggtgtgagccaccgcccctggcccacacttttttttgagttagagtctcgctctgttgcccaggctggagtgcagtggcatgatctttgcttaccccaacctccacatccgggttcaagtgattctcttgcctcagcctcccgtgtagctgggattacaccgtgtagctgggcgccaccacgcccagctaatttttgcattttcagtagagacagggtttcaccatcttggccaggctggtctcgaactcctgacctcaggtgatccgcccgccttggcctcccaaagtgctgggattacaggcatgagccaccacgcccagccaaccaacacacttagtaaccagattgtctttttgtctgggagtcatgatttctgttctgtcttctgtggtttttttatttgttttaattatgtgtaaagacagggtctttatatgttgcccaggctggttgcgaactcctgggctcaagtgatcctcctgccttggcctttcaaactgctgggattacaggcatgaaccactgcacccagctgatctcctgtctcttgagagttgatatctagctccacctcctggcactccctagtcccttccctgaccccaggggcttacagaacccactgttcctctttcaaggacaggaatgaaggatgctgatgttgagagaacctgggaggaaggcttgctctcatctttcccagcatggcttggtggggggccacagctggattgagctattttggaagaggcagacctggtggatcctaagtgccccactggtggtgcctgtgtgtctccgcaccgcagagagaagggccgtaaggagagagagtccctgcagcagatggccgaggtcacccgcgaagggttccgtctgaagaagatccttattgaggactggaagaaggcacgggaggagaagcaggtaaggaacccgcgggggctgccccagggtgatctgggccttgaggcctcatagtgtgggcttgcaaggctggggaggggtttgcccctgactgctgttctggggcaagtgactgcctttcggagctttgctttctcagttgtgtgctaggcgtttagtcattggctaagtataatagttcccgagggggaggctgtcagcttaggtgtttatcagggcctcgggcatcagactaaagcaggctggaagggcctctctgcctcctggggatgggagggttgcttctctgtaccccggatctgtggtgccattgcctgtaagatgggctgatgaccagatgactccccagttctgatgttagaaagataacgtcagccagtagcagctggattaattccatagggtgggtgctttggggtccctaggtgtgtgtctctccctgccttgcctgtgtactgggcaggaggctggaaaccgacctggatttgcctcaaggcattcattgctagtgggagggacagccagccagggctgctggacaaagggaaattcggggtagagacttcttgcccagttcctctccctctctgccttgggggcaggaggcaaggaaggcttcttggaggaggaggcctctatctcacatgaaatctgttgggtaatttggagttagccaggtagagtgttccaggctgaaggaacagcatgtttgaagaaccggaggcagaagagcgtttaggggtctgaatgttgtcagggcgactggatcctagtaagatagggatggggcaaatggggctggagaatcaggcaggggcctgattacctgggcccttgcgggctacattgaggcgtttgggcttctctccagagggctacagggaaccccagctcgggagagagacccagcttggtgtgtgttttggaacatctccctgctgccctgtggagtagaggcagggaggtagtagtcaatgaggaggaggcagaacagaggagagctggtctcttgccttctgcccacccagaaaaagctcattgagctacaggctgggaagaagtctctggaagaccaggtggagatgctgcggacagtgaaggaggaagctgagaagccagagagagaggccaaagagcagcaccagaagctgtgggaaggtatggcagaaatggccaaggactcaccttcagtcctgggtgggagcaggtctgggcctaggagtctcccgctcattatctgttgtcagtttcagcaggtttttgatcatgctgcccatcgccttgtgtgctttgaggttcgcttggattgtggcatatgtcaggagcctcctttttaaaaattgtttaaataatttgttttttgaaacagcgtctccctctgccacccgggctggagtacagtggcgtgatctcagctcactgcaacctctgcctcccaggttcaagcaattcttgtgcctcagcctcctgagtagctgagattacaggcacctgccaccacatttaactaattgttttgtatttttagtagagacggggtttcacaatgttggccaggctggtcctgaactcctgacctcaagtgatccacctgccttggccccccagagtgctgggattacaggcatgagccacctcgcccggccgcctacttccttttaacatcaatgtagattttgttatatgactttagcaggacttagttaatccagtgaccatttttcctatcaggtgtttggtatttgtcttcactaattgtaagagcttttttgtggctgggcatggtggctcacgcctgtaatcccagcagtttgggaggccgagacgggcagatcacctgaggtcaggagttcgagaccaccctggccaacatggtgaaacgccatctctactaaaagaaaaaattatggccgggcacagtggctcatgcctgtaatcccagcactttgggaggctgaggcaggcagatcacgaggtcaggagattgagaccatcttagccaacatggtgaaacccatctctactaaaaatacaaaaatcagctggacatggtggtgtgtgcctgtaatcccagctactcgggaggctaaggcaggagaattgcttgaaccaggaagttggaggttttcagtgagctgagattgcgcccctatattccagcctggcaacagagtgagactccgtctcaaaaaaaaaaaaaaaattagcctggcatggtggcatctgcctgtggtcccagctacttgggaggctgaggcaggagaatcgctggaacccgggagacagaggttgcagtgagctgagatctcgccactgcactccagcctgggtgacaaagcaatacttcatctaaaaaaaataataaagagctttttctatctggggtttggccctttgtctgcaactgaagatttttttttagtttatttatttttgagatggagtctcactctgtcgcctaggctgaagtgccaatggcccgatctctgctcactgcaacctctacctcctgggttcaagtgattctcctgcctaggcttcctgagtagctgggattacaggcacctgccaccacagccggctaatttttgtagttttagtagagacggggtttcaccgtgttggccaggctggtcttgaactcctgacctcaggtggcctgctttggcctcccaacgtgttgggattacaggcatgagccacggtgcccagctctgtctgcaactgaagatattatttcccttcttcatttgtttttggtgctagagcctggtgttttttggtaaggccacattgcatgtagaaagggaattcactgtctggctctgtctgcccctgaatctttgtcgtgttgcaagcttcctttcacttgggtctgggcaagctcaggcctgattttcctcaggatgtgttctcagtgtggagctgtggaatcagagggaagcgccatgttttgacccagattcccaaagggtggcggggctgagccagggctccgagggtagatggcctggattgggccccaggctacacctctcactggctaggtgattatgggcaggtcccttcacccacagaaaggtcagggacccctcaggccctcatctgtgagactcagaacagtgtcagccgggtctcctgggacatgcgggatgtcctggggtgacctaagactctctagaggaaataccagctgtttttattctgtttgtagaggaccaagctggagcttggtatacagtgggaactgaatcctggtatacagtaggaagttaatcattggagccgctgttgtggctgctttccgctctgcttaggttagagtagcgacagacaaaggagggacttttgggacagaggctcggtccccttctgtccggctggcccctcttcctgggagcagccctggggacccccaagatgcccccaggaccggtctccctccctgtatcctccccatctcccagcatccttggccatgaagtctcattcctgccagccctgccccgacatgcctctgccaggtcctaaacctaaagtctcagtggtcgctctcctctccccaaccccacctcccacctctgaccgtctgcgcactccatctgcgtctccccagaatctgcctctgctccgtgcttcttcctcagtccccagcctgggccagcccttgttatcacctggcttctgccctcgcccccacctctgtcccaacagtggcctgacagggctgccctctgccacctgggttcccacctccctgctccagccccaccagtggccctcctgcctctgcactccccaccttgtcccggtctcccccaacacaaccaggcttcaaccattcaccttgctcttcgtctgttctcccctggtaagggcagggacctttgtctcctccacagtcgtgtcctcagggtccagcatggggccaggcatatagtaggcgcttggtggcaaacgaccctgtggggtgcgggggctgatgggagccggtgggtgggcagggggtgacagaggtggcttctttacagagcagctggctgctgccaaggcccaacaggagcaggagctggcggctgatgccttcaaggagctggatgatgacatggacgggacgtgagtgtcccctagttggagctgcccacctttccgtgggcctgggtttccctccccgccaccctcgcctctagaaaccagccagatcctccttgggttcccccggcgtggggtccaggctgatcccaagccccgtgtgaccccgcctcttactcgtggatggccaggtccaggatgccctgggcgaggagatagggggaccaccctctccccaggagctgggcacagaccctcagcctcagggagtgtgtctaggcatctagtgatcggatggcttttcccagccccactacgctctggggaaagccagacctgggttcgaatcctggctgtgcctctgagcttgctgggttacctggtggagggtggacttttgggggctgagaggcacacggggagcctaggagatgtcaggtgccaaggagcagggggcttcagagggaccgaatgggcaagggtgggggtgggctttgctgggtgggggaccaaggcagatggcagcttcaatgtgccgggtcctggggtggaaggaggtgccacctgggtgagttggtagagaggtcatcggacatttgggggtccaggtatctcccagtcccaccccttactttgagctcctttggggtcatggagtcctgaggagggggcaggagggtggggaggcccctacaccttgaggtcctgaagcaagttccagggtggggccctgcagggaagaacaggtgggccacatggtgcccccaactgagagccactggggcctcacccctccagtctgcttctgccacgcccccgcagggtctcggtgactgagctgcagactcacccggagctggacacagatggggatggggcgttgtcagaagcggaagctcaggtacccccggctgccccttggttggggacttctagggagcattgccccagggtgacctcagggcacaggagggggaccaaggaaagctccttgctggcctgggatgcctcctctgggtgagctgggatggcagccactcagggccgcttcccgcctggcaggacccgggatggagccaggtcgcgctggagcccgtttccccgcacctgcccccactctacccgctgttgagcacccaatccccttcctcccccacccctgtcctgccctattcccctcctcccccacaccctcgtcccctgtctgtctcctttcctatcctcctccttccccgtggcccctggcttctggcctcccttctctgcccacccctgggtttctccctctccatctgcagcctgggccttggcctctcccttggagggcctggccctctctggtcctgggctctctcttcctccatctgtacgtccgtttgtccatctgcttctctctttctgtctcagtgcccccaaccactccagcccctggtctcctcctcccctcccacgggcctgtgctgccccctcctggccgcagtgcctcactggcgtggccctggcctggtcatcagggcccggggcccagccctcccgtgcctggcaccgcagcccgggtgccggggtggccgagatgggggacacgtggtggcctagatcttgacaccacccccaacacacacaggccctcctcagtggggacacacagacagacgccacctctttctacgaccgcgtctgggccgccatcagggacaagtaccggtccgaggtcagtggaggagaagggaggggacttggtcctcccaccacactgcccccaccccgcctcacaaaggagctgcctctggttctggcacctggccaccctggccagctgggtggccccagcaccccccaccgagaccccccgaccccagctgtcggtcctccctgcaggccccgcaggaggggcagagacaccgaggctgccccttgggctgtggtgtgagcctgagggtgtgggtggaccctgagtccacaacaccgaccgcactgctcacccgccaggcactgcccaccgaccttccagcaccttctgcccctgacttgacggagcccaaggaggagcagccgccagtgccctcgtcgcccacagaggaggaggaggaggaggaggaggaggaggaagaagaggctgaagaagaggaggaggaggaggattccgaggtgcagggggagcagcccaaggtccgtgtttgggggagaagtggagacagagagggtgggggaagggctactcactgaccctgcccctgccccaggaggccccaccgccactgtcacccccgcagccggccagccctgctgaggaagacaaaatgccgccctacgacgagcagacgcaggccttcatcgatggtgagggtgggcgggggccaggctcctcgggtgggcccagcgtttcctgccgtggtggcacaggtcgagggaagatcctgagcttagaccctgctctgactcggccagcacaagccccagtatcttggggagtccaggaagggggcctagggtaagccagtcccaccctcgccagccccaaggggcccttctgcctccccaagggccgcagcttgtttgtgtcactcctggccccactcgctcaggagctgggagcctgggcagcaagtcggggctgctctatagctggtgaggccctcaaggctgtcggggtgaagtccttggccagagcaaaatgagggtatgggagcacacagccacatccatggaaccccgttccccatcctcctggatggggttgaggacatctctgacctccaacccctctcccagctgcccaggaggcccgcaacaagttcgaggaggccgagcggtcgctgaaggacatggaggagtccatcaggtagcgggggctgaggagcggggacacctgtcccacagcgactgctccttgactcccaggggagctggtgatggggaatcactgaggcaaccacaggctgggcctggtccctgcagggagggtccctgggaggtggcagggaggacagcctgggcaccattgctcagccagaccctcctgtgtctgtcgtcctgggtcaggcactggcgtccccagctgccccttaaccgctccgcctccccttccaggaacctggagcaagagatttcttttgactttggccccaacggggagtttgcttacctgtacagccagtgctacgagctcaccaccaacgagtgcgtcccaggaatgcaggggcccccactggcagggtgggaggcgggtggccccggaagtggcaccggcagtttcctgatggttggggaaccatctgcgggtggggcccgagagtgctgccttccatattgagggggagcagaagccaggggccaggtttagggttggtcattggagttggaggtaccctgtgtgtggggactggaggaggcggtggggggtggctgtgggaggaggctggaatccctgcgttccccaacccatatgtcccggtcctccacagatacgtctaccgcctctgccccttcaagcttgtctcgcagaaacccaaactcgggggctctcccaccagccttgggtgagtggcttgggctggccccttccctctgcctcctcctggtgccccgacaccggcccagccctcagcaccctgtgtctctcacagcacctggggctcatggattggccccgaccacgacaagttcagtgccatgaagtatgagcaaggcacgggctgctggcagggccccaaccgctccaccaccgtgagtgcctgcaaggcaggggagctggggcggggagacccaggcctggcccagccgaaccctctcgagcacccgtctgcccatccccaggtgcgcctcctgtgcgggaaagagaccatggtgaccagcaccacagagcccagtcgctgcgagtacctcatggagctgatgacgccagccgcctgcccggagccaccgcctgaagcacccaccgaagacgaccatgacgagctctagctggatgggcgcagaggtgggcggggaggtggagtctcgtcggcctgccccagcaaggggaggcggcgggccctgaggaagatggacccacatggccactctatcaacctgtgtccccatgttccctgcttttttgttttgtttttttgaggtggagtctcactctttggcccaggctggagtgcagtgatgcgacctcagctgactgcaacctctacctcccgggttcaaacaattgtcttgtctcagcctcccaagtagctgggattacaggtgtgcaccaccatgcctggctaatttttagtagagatggggtttcaccatgttggcctggatggtctcgaactcctgacctcagatgatccacctgccttggcctcccaaagtgctgggattacaggcatgagccaccacacccggccatctcctgcctttttttttttggatggagtttcactcttgttgccgaggctggaatgtggaatgcaatggcgcgatctcggctcactgcaacctccacctcctgggtgcaagcaattctcctgcctcagcctcctgagtaattgggactacaggcgccgccaccacgcctggctaatttttttgtatttttagtagagatggggtttccctgtgttaaccaggttggtctcgatctcctgacctcgtgatccgccctcctcagcctcccaaagtgctgggattacaggcttgagctaccatgtctggccatcccctgctttttaaaaaaagatttttttacttttgaaactaaataggccaggcgtcgtggctcacatctgtaatcccagcactttgggaggctgaggtgggcggatcacttgaggtcaggaggttgagaccagcctgaccaacatggtgtaaaaccccatctctactaaaaatacaaaaaaattagctgggtgtggtggtaggtgcctgtagttccagctgctcaagaggctgaagcacaagaatcacttgaacccaggaggtagaggttggagtgagccaagatcatgctactgcactctccagcctgggctacagagtgagactctcaaaaaaaaaaaataataataataagagaaaatagacaaggtctccaggctggtcaactcctggcctcaaatgatcctcccacctcagcctcccaagcagccgggactacaggcaaacatcaccatgtccagctgtccccagctttctaatctggtctttctcttgccccagaacctcaagaaggcatgaagccagcccctgcagtgccgtccacccgcccctctgggcctgcctgtggctctgttgccctcctctgtggcggcaggacctttgtggggcttcgtgccctgctctggggcccaggcggggctggtccacattcccaggccccaacagccttcaaagatgggtaaaggagcttgccctccctgggccccccaccttggtgactcgccccaccacccccagccctgtccctgccacccctcctagtggggactagtgaatgacttgacctgtgacctcaatacaataaatgtgatcccccacccaaacttgtctgtgtctgcctcgctttgctggggtgtggaccggggtgtgggcaggggttgagcgcaggggacgcagctttctgcagatcccacccgggcctcccccaccatctggggatcactcctgaagataccaggtggatggaccctggaccatttctgtcttgagcatccatccgggcccgtgtcccaccttccctgggtctcatctgtgctctgtggaggccaagggttccctcccggggccaaagcccctgctgcagacagacccaggcccagagaaggacgggggcctgggcgctactacacaggctgctcctgcgtgctccccgcgcagcggtgcagagatcacccaaggccttaagattctgaacttttattttctggcatgaaaagtacaaataattaaacaattccatgtaaaagtctgttaccgcggccaggcctgtgatcccggtaataaatagtctaaacgcaacgcgaagtgttcttgttgggttttttttttttttttgtcttttgttttgtctttttttttttttttttttttacagttttttatcacctccaacatggactctgtcgtgatttgaaaccttccgaataaataacaggatgaagggaggggtggaggggctgagccccctcccccctggcctggcccctgccccccagggacgtggaagccccaagtccccctcgcctgggagccccggcctggccccctgcggggaggggctggcctccagggagggggcctggctgggctgagttttgtgttttagaaaaagaagtcccctcccagtcttgggggtggcaggggcctaggcctcggtggggggggggtgtgtggggaggtgccccctctctggagcctggccccccccagggtgggggacaaacccagcccttattgctcggacgccctgctgcaagcttcccacgcggacgtgcgtgttcccgaatgcagagggcggaggggagagagccccaagagacagcaggggagaggggtccctgccctgctgcaggggagaggagagagggcagggaggacttaaaaccacgagaataaataggttcgtgtatcaagaacaagctagggatttcaccagctaaataggactgaaaaaattctcaagacaagagcaaaaagaatcccattggtgacctggacgtcgctggccgtggggactgtcccgcagagcacacgcccccgcgtgccactcggctaccattactgttattaataattattattactttaatgattccacttccccttttataaataaattaggcataaccatgtctcggcaaaacttaaagaaacaaagagaacattgtcgttcctttaacttgcaaaccggatgaagtaacagaaatatacacggatgtccttacagggcaacgaggagaataaatagttaacatagcaataagttaaaactacaagaagctaaattcagcaaaaaagtacaagaaagttaactggtgccagtttatgtcttttttttttttccttttttttttttaaatctcttctgtgtgttttctttttttgttgcttttttttcctcttctgtttgtgtttttttgtcgcttttttgatttttttcttttttgttccttgcagcagaagctccacagacgtttaataacaacaccgggaggggtgggggagagagagctggacagtcagatgggggcgccatagccagacaccaaacgtggggacaccgggggaaggcaacttaactatagctaaagtcgggggttttgcaattctcagttccgatggggccgctgagtggggtggggagcggtgcgagggctcccaggggctccggcctgtggcttctgttggaattttttttttttaaagaaagaaaactagggcgatgcaatgtccagacagaagccgggggccggggctcgagatcgggggctgtgtccactgcaatctggaaagacgaaaaacccaacaaaccgaaaggggataggtaggtgacaagtggacgggaaaggagtgtggggctgggcctttgggcccatccaccccaccctgggcctggcggggagtgccggggtcttgctgccggggaggcccagtcctggtgggggaggctcagggctgggcctctccctcagctgtgtgggccaaggcctcggcccagggggaggctgagccccggggacaggggtgtcctttggcctcaagtgttgtgggggggggggctgcctccagcccaccgtgacgccaaggtggaacgaggtatcgtgtgtctcaatgcatgtgcgctgcgtgtgcacgcctgtgttcgtgggcgccaaggagaccgctgggggtccaggagagatctctgcagagaacctgggggccagggcgagggggccgagagggtgagggagcgtctggggcagggtctggggtgggacctcctgcctgggcctgtgggatgctatgggcatatgtctgcgtgttcctgggtggtgtttgtgtttctccgtgacctggtgtccaaatttgatgtccaaatatctatcgctacattcacgtgtgcacgtggacaggtggatggattcgtgtgcccacatctgtggtctgtgtccacatggacgtagccccagcttctgtctctttctgtctatccctgtccacgtgtctgagtttggccaaccagtcccttaacgtgtctggggcatgtcgctgtgtccgtctgcgtctgtccgtgtgtccccgtggtgtgactgtctgcgtggttgtttctctgtgtggccccgtgggctgctagcccctaagccctgctccctgggccccccccacccccgccccagttggtaaacataacctgccaaaatattttctttttttttttttgtctttttttgtgtttttttttttcaagttcaagaatccccagtaaaaattctccacgaggtctttttccctttttacaaaaatagagtttttcttcccctcccacccccctttttttttcattttgtttctgcttccagccccactgcctgctcccccgcattccaccagggggcactgggccgggggtgcccacacccctcctcacggttcgcttttttggggatttttaaacctgttcctcctaccccaggccccacctaggtgctggggaggcctgggcaagggggtctgggagggcaccccctggagccccccaagccatcccatcgggggtggtcgagggtgggggtgggggcacatctctgcattctttttagccgaaaaaagaaacaaaaaccttcaccatgaaccaaaccaagacgagagagtgaacagcccagcctggggtgggggcaggaggatggggcgggggatccccgggcacccccccaattccctgcagaccctcccaccccagagtgctcaccctgtggcttccgcagggacgtggggccctcgcgtcgtccgtggggctgcctgtgctgtctctcttgggccccttctctctctctctctctctttctctctctctctctctgctgcccggggagggggtgggagggcaggcggggtgggctcacgccttgtgctgtttgctggtcttgaaggagacctgcagcacgcgctcgcccaggcgatagccgttcaggctggcgatggccatggccgcctcgtcatagttggtcatggtcacgaagccgaaacccttgcacttgttggtggtgaaatcacggatgaccttgacgttggtgactgccccaaaaggcccgaacagctgccacagcacgctctcgtctgcctccggtgacaggttgtacacgaagatgcaccagccggcgcccgccgcgccccccgacaggcccacgcccgccaggccgctcataccatcgatggcgatcggcgagaacctggcgatgagcgacaggggactactttgggggtcacgcgggctctgccctgaccccccgcatgcttctgaccccgttgtgacccttcacacctttatgacccctgactgtgccatgaccttggaatggtgtgacccctgcaatgcaatttttttttttagagacacggtctcgctctgtcacccaggctggagtgcagtggtgcaatcatggctcactgcagctttgacctcctgggctcaagcaaacctcccgcctcagcctcctgagcagctgggactgtaggcaggcgccctcacacccagctaattttttttatgatttgtggtgacacagtctcactatgttgcttaggctggtctcgaactctcaggctcaagcaatcctcctgccttggcttcccaagtagctgggactacaggtgcaccactatgccccactaatttttttttttttttttctgagacggggtcttgctctgttgcccaggctggagtgcagtgggatgatctcagctcactgcaacctctgcctcctaggttcaagcgattgtcctgcctcagcctcccgagtagcacctgccaccacgcccagctaattttgtatttttaatagagatggggtttctccatgttgatcaggctggtctcgaactcccgacctcaggtgatccgcccgcttcgacctcccaaagtgctgggattacaggcatgagccaccgcacccagccatgccccgctaatttttaaaaatttttgtagaggtggggtctcgctgcgttagccaggctggtctcgaactcctgggctcaagcaatcctaccaccttggagttccaaagtgctgaaattacaggtgtgagccactgcacccggctttccttttcaaatcatatatttattatcatcaacttcatcttccctgcaagagtttgttccagcccctgaacaacacctagtaagcacttgggaggtgtctgttgaatgaattaatgaaaggacagaattggctccactcacattcctcactggcaatcccgcccttggattaaacccctcagctgggaagggaggacccaagggcctgaaccattcaatcctgaccacgaggaacaaactactcgctccttctggccctctttgcacaggcttttcccactgctaggaactccctttccactctgcctttgtgtggatgttgcctcagatgggactggggggtctctgctgctgggtctccgtcaccccttcttttttttttttctttttgagacggaatctcactctgtcgcccaggctggagtgcagtggcacgatctcagctcactgcaacctccgcctcctgggttcaagcagttctctgcctcagcctcccgagtagctgggattacaggcgcctgccaccgtgcccagctaaatttttgtatttttagtagagatggggtttcaccatcttggccaggctggtcttggactcctgacctcgtgatccgcctgcctcggcttcccaaagtgctgggattacaggcgtgagccaccgcgcccggcctctgttaccccttctacttcacagctttcatcaccattcatttctctgtctcctcccccactagactcagactgagatcttcttttacattttttaattatttttttttttttgagatggagtttcgctcttgttgcccaggctggagtgcagtggcacgatttcagctcactgcaacctcctccttccatgttcaagcgattctcctgcttcagcctcctgagtagctgggattacaggcatgagacaccgcgcccagccacattttttaatttttggagataaggtctcgctctgtcacccaggctggagtgcagtggcaccatcatagttcactgcagcctccaactcctaggctcaagcgatcctcccgcctcagcctcctgagtagcctgaactacaggcatgcaccaccgtatcaggctaatccttaaaaaaaaattgtagagaaggatctcactatgttgcccaggctgatcttgaactcctggcctcaagtgctccttgcccctcagcctcccgaaacactgggagcacaggcgagaaccaccacgtctggctttgatgtcacatctctcaatggccatgctactccaagacccaggcaaacaaggctaagcctgcagccctgggggtgagctggggaggggtgcatcaggggcatggatggtgaggggtggggacagtggggcggggtcactgttacctcttgacgccgtaggccatgttgagcaaattgtccagcctgtggaggcagaggtggtggtcagaggtggcttccagtcacgcccccctgctgtgacaccgtcggcctgccctccccacccccacccaacaggcctgcagcagagccctgcccccgcctgcctgctccccgcccgcccggctagacactgcctggcacggaaccgtggtcactcaggcaccgcctctcgcctgccccaccgctgtccagcctgcactggcctcctcatccatcctccccctcctggctggcgggtcccctctgggcccaggcgctgggatccctggggaaagataactcctaacaaaggcgacagtaactaccacagccaacattctcgcagcacttgagggggtgggtaacttgccccggccacccgggggcccacaaggggcttccattgtctccccttggagtggctatgagcttggactccaggtcctgggtttgagtctctgctctgtttgggccaggcaaaccccaacacctctctgtgcctcagggtccccgtccataaaacagggacaacacaagctctgttctcatcgggttgcagaaaaataagggtgtctagcacacagcaaagactcatgaaatatttggtgttattacagatgggaaactgaggcacagagctacagccacgtgcccaaaagagaaaggggccaccagagctggaacccagatgacgccaaaatcttttaacaccaagaatgccaatcgtcgcggccagcacacattgagggcctgctgtatatgagtggctggccttggcacctgacagataggctccttggctcccatgtgtgcgcaccctcccggcatccctcccttcggcaggaatggggttcagggagggttgcaagcttgggggcacccggcctggggccatctggctggcagggggctcaccggaaacgctgggtctgatggtgtagggggcctgcgtagcgccgggcggatgactggtagaggtgggtgagcagcgcctgccccgtcttctgacttgggttgttcgcgaacttgactgtgatgggctcagctgcgcccagcggcttctgcccattcagtcctttgatagcctcttcggcctcaatcctcttgtcaaagcggatgaatcccacaccccgagagacacctgccagggggcagggatgtccatcacgacgaccctgtcccctcctgtgtaaccccacttctcccttccctgcttcatgccctggcatcttggtcggtttccccacgttggtcccacctgactgcctttgcccagcgcccccgccaggtgcaccctccctgactgcctgacctgtgacctggtccaccaggatgcgggacgtgatgatgcggccgtactgggagaagagctgctccatctctttctggctcatggtcttggggagcccgctgacgtacaggttagcatcccggatggatgctgaactgggtctggcataggacacctgggtgagggggtcagatggacaggggtgaggcagagacccatttcacagatggagagagtgaggccatgtctaaaccatcacggagttagcagaagtgacccatccgtcactcaataagtatctctagagttgtcaccgtggggtggggctgagtcagatatgggagaggggacatggcagtggctgtaacaacttggactgcctgtatagagtgatggggacctgccacctagggaggacatgtctccctggggtgacatgtgaccccaaagggatccttgaatagccggctcacatcactatcacatgcttgacagtccatcaacaaacattgacctttttttttttttaaagacaggatctcacttttttacccaggctggaatgcaatggtgtgatctcagctcactacagcctcgacctcttgggctcaagcaatcctaccgcctaagccccgcaagtagctgagactacaggcgcccaccaccacgcctgaccagcattttttttttcttttttttttttttgagatggagtgttgctctgtcgccaggctggagtgcaatggcgacatctcggctcattgcaacctctgcttaccgggttcaagcaattctcctgcctcagcctcctgactagctgggattacaggcgcccaccaccacgcctagctaattttttttttatttttttgtatttttagtagagacgggtttcaccatgttggccaggatggtcttgacctcttgaccttgtgatccgctcatctcggcctcccaaagtgctgggattacaggcgtgagccaccgcgccttacctaatttttataattttagcagagacagggtttcatcatgttggtcaggctggtctcgagctcctgatctcatgatccgcccgcctccgcctcccaaagtgctgggattacaggtgtgagccacctcccccggcctcagctaatctttaaatttttttttttgtagaaacaggatctcactgtgttacctaggctggtattgaacttctggcctcaagcagttctcccatctcggcctcccaaaatactgggattataggtgtgagccaccatgcctggcctatttttattttattgaaagacggagtcttgctgtgttgcccaggctaaatgcagttattattcacaggtgcaatcatactgcactgcagcctccaactcctggactcaagccatcctcccacctcagcctcccaagtagctgggactacaggcatgcaccaccacacccagccactcttcccactcctatagagagtggacctaagacactggccccttctcttcccagctacactgggccccccagggacactcaggtctttagtcatcagctcccaaatgtccccagtctgcacccctggtggcaactgcatccaggtgccccacatgggggtgtcaagggcacttcatacacagcacgggtgcctcctgctcccgcccgcctccaatctgccccaactcactaatggcaactctgtcctcctaagtgctcatgtccccaggttcaggttgttctcgacacctgttcttcacatgcacatccaacccactctaaatcctgtaggctctaccttcctccttatccagaatccacacacttcaccccactgccactgtcccaccctggcccagccttcactactgatcacctggaccagtgcagcagcctccaccctggccccccctgctcccatcccccactgtctgtcccccctacggcagccagagggcgcctgtgaacacctgagccaggtcgcatcccccctctgctcagaaccctctatggctcccaccttcctcagcagaaaagccaaagtcctttccttggaccgcaaaaccctgcacattcttccccatgacatccttgccctcatctccccctacttcctgccccaattactgtgttccagcaacttgaacttcccccatttttcccaaacacaccaggcatgtctcagcctcagggccctggcattgcctgttctctctgcctggaatgctcttcctcctcttctttctttgggtctcagttgaaacatcctccctgtcctctctcatctaaatttgtcctccccccaccacccctattactctttctcaaagcacttctcctaactaggaattagacacattttagcactgttatctgaatcacattattaattatagtccaacccaacaacgaaactctctgcaggtgtttaaaaaaatggtgggtcaggtgcagtggctcatggctgtaatcccagtgctctggaagttcaaggcaggaggatcaagggagcccaggagtttgagaccagcctggacaatacagcaagactcacccccgtcctccaccgccacaacctctacaaaaaaaaaaaaaaaaaaaattagctgggtgtggtggtgcacacctgtggtcccagctactcgggagactgaggctggaggatcacttgaacccaggagttaaaggctgcagtgagctatgatcacaccactgcactccagcctgggctacagagcaagaccctgtctctaaaaaaaaaaagagaaaaagatggacatatatatttatttcccagaaacggtggtgactggtgagtattgtaaaatgggggacagaaaagtctatttacaaagcagggaatattgtgtgaccttgtttcattgtgtgtttatcaatgtcctggaagcatggtagggaagtccacctctcaaatgctcagtgggtgacctgtcaccagggactggggaagaggctggggcgtggtcatcagcaattctcccccttatgtctgctgtatctatttttcctccctccctccctccctccctcccttccttccttccttcattccttccttctttccttccactctccctccctccctctttcctccctccctccttcccttccttcctttcctctttctttttcttgttaagtgaggtttttgtttgtgggtttgttttgagatggggtcttgctgtgttgcccaggctggagtacagtgatgcaatcatggttcaccacagccttgacccccccgggctccagcaatcctcccaccctcggcctcccaaagtgctgggactacaggtgtgagcctttgtgcccagcctctattttctgtttcttctaattaacctcttgatagataggggtcattgtcttctggcttttgtttgggacagtgagttgagacagtgagttgtgagagtgtatgcctccattagaaataactaattaaagctgggcgcggtggcgcacgcctgtaatcccagcattttgcgaggctgaggcaggcggatcacaaggtcaggagatcaagaccatcctagctaacatggtgaaaccccatctctactaaaaatacaaaaaattagccaggcgtggtggcgggtgcctgtaatcccagctactcgggaggctgaggcaggagaatggcgtaaacccaggaggcggagcttgcagtgagccgagatcgcgccactgcactccagcctgggcaacagagcgagactccgtctcaaaaaaaaaaaaaaaaaagaaataactagtttaaaaatgaacaaaatagataaagcagtttgagagtgaatggggggcagggtctgattaatataattttgtgcacctggggttctccagaaaaaaaaatcacatcagccattgtcatgtccataataatgatttttaaaatcacagccaggccaggcacggtggctcacgcctgtaatcccagcactttgggaggccgaggtgggcagatcacttgaggtcaggagtaggagaccaccctggccaacatggtgaaaccccgtctctactaaaaatgcaaaaattagccgggcgtggtggcgggcgcctgtaatcccagctactcaggaggctgaggcaggagaatcacttgaacctgagaggcggaattgcagtgagccgagagcgcaccactgtaatccggcctgggtaacagagcaagattccatctcagaaaaataaataaattaattaagaaataaatcatgtccatgctgggcacggtggctcacgcctgtaatcccagcactttgggaggcttgaggggggtggatgatctgaggttgggagttcgagaccagcctgaccaacatgctgaaaccccgtctctactaaaaaaaatacaaagattagccgtgcatggtggctggcgcctgtagtcccagctacacgggaggctgaggcaggagaattgcttgaacctgggaggcagaggttgcagtgagccgagatcgcgctactgcattccagcctgggtgacagagtgagactccgtctcaaaaaaaaaaaaaaaaaagaaagaaagaaatcatgtcaatgtatttgacagttttctcttctttttttctctcccatggggctaggagctgtgagggtacttgctgatgaatcagatttgggttgagggattagatttgggggtaagatcctgggtggatattggaggtccaacaccgtctgagacacagaggaggttttcacaggccttttccatccctccatgacatgggtttcccaagggcaaggatggaccaaactccacccacaccccaccctgggatggggcctggcccgcggcaggcagctggagatattttgggcagctgccatagcgcccagtcctgactgaccgcgcaacaccgtcacacaggcaaaaacacccagggacagacagaaggccatgcagtgccgccccgctgcacagcctcagagatgaaaccagccagagggtgacacaggccactgtcacattctcagcaacgttcaggagggagtctcagagaattacagtgaaggtcgtagaaccacatacccatcacagcgcagcacaaacacacgatatcacactcaatccctcagagcagggcacaggtagacacacccacacaacatcgcggtgacacacaaacatcctgccagagccagacgcatccctgaggccccatcaggtcacagccggagtcacagtgtcacatgcacctgtcaaataataagcacgtcatcctgggccgggtgcggtggctcacacttgtaatcccagcactttgggaggctgaggtgggtggatcacgaggtcaggagttcaagaccatcctgaccaacatggagaaaccctgtctttactaaaaatacaaaattagccaggtgtggtggcgggtgcctgtaatcccagctactcgggaggctgaggcaggagaatcgcttgagcctgggaggcggaggttgcagtgggccgagatcgcgccattgcaatccagcctgggcaagagagggagactctgtctcaaaaaaaaccccaaaaaatcaaaaaaccaaaaaaaaaaaaccttatcctacagacacatagggatatacccgaagtcttaaatacacagatgcacttgacagcagcctctctctccctccctctctctccctctctctctctctgtctctctctgtctctctctctctctctctctctctctctatatatatatatatattttttttttttttagacagggtcttgctctgttgccgaggctggagtgcagtggtgaaacatgactcactgtagcctcgccgcctcagcttaagtgatcctccccactcagcctcccaagtagttgggactacaggtgcaagatgccacgcccagctaatttaaattttttttttttaggaacagggttttgtcacgttgcccaggttggtctcaaactctcgggctcaagtgatcctcctgcctcggcctcccaaagtgctgggattataggcgtgggccactgtgcctggccacagccactcgcacactgtgtcccacaaccattgtgtcacagccagagccacagtgagtcacgggacacctggatcataaacactgtatctcacaactcaagatgacacacacacaccccacacacacatacacacacacatacaccacacacaccacacacacaccacacacaccacacatacacatacatgacacacacatacacacatcacacacacaccccccacacacatacaccacacacaccacacacacacacatcacacacacaccacacacatacaccacacacacatcacacacaccacacacatacaccacacacaccacacacacaccacacacacatgcaccacacacaccacacacaaaccagacacacacatacacaacacacacaccacacacacatacacacatacacacaccacacacaccacaaacacacaccacacacacaccacacatatacacacaccacacacaccacacacacgcaccagacacacacatacaccacacacacaccacacaccacacacacatacatacacatacacacaccacacacacaccacacacatacacacatacacacatcccacacaccccacacagacacacacacaccacacacacatacacatacaccacacacatacacaccacacacatacacatacacaccacacacatacacataccacacacacatacacgtaatacacctacacgccacacacatacacacacaccacacacatacacaccgcacaccacacacatacacaccgcacacatacaccacacacatacacacacacacaccacacacacacacaccacacacatacacacatgcacacacaccacacacacatgcgtacacacacacatgcgtacacatatacatacacacatacacacacacatacacgctgcatctcaatgtcactggggtctggggtcctcatgccctgaggcttctgggtctcgttggccatgaagggacccattgggtcacaacttcactcccccaccccaatccccaaccccccacatcaggaaagggaagagattcctgcacctctgttcccatgttgaactgggggccagatgggccacccccccgaccctggcttcctccagggtccgggagcagatttgcagggcggagcccaaacacccccaggcgaacccagagaggggggtttccatgacgattcccccccagggaacctgggcttgtagggtcccagctgcagctgctgagaagggaggtcctgggggaggggcgttgcacaaagatgggggatgggccgccccaatcccgccctcccagaccctaattaggctccagatggcagatgggcccccacccccatttccatgacaaaagcagggaggggactgctcacaggaccctggtcactctgccttacagggcctggctgactccctgagcctccagagatcgtggagccagtactgtccccattgacaggtgaggaaactgaggtttagagagggaaagccattgcccccaccccagctaggaagtcttggaggggagatttgagcccctctggggatgagtcctgaaaggcagtggacatggatgcatgggggcgggtaggtggcagtagggggttggggacagtcagttggggtgggcggtcatgggggattggagaaggaggcaccaaccttgatggtcttcgtctgtaatttgaggccgttgagggtgttgatggctttgtctgcatcattggggtcagaatagttcacaaacccgtagccaaggctctgccctgtgggcagaaccagaatgatgaccttcccacccagccttgacacctgccagtgtcccacctcaggcctgagagactgtcccctccccaccaagtttccaccttcctgtttccagatgacaccttcgatgctagagtcccacctgcctccatcgctcctgagaccttcacctagggggtatacccatctccccatcagacctcacatccctagaccacctcctgcctcgattacccccgagacacctcagcaagggtcccacctgcccccatcacctctgtatttctgaggctaccacctctgttcctccccgcaactccagcagccacacctgtgatcttgtcccgaaccaacttgcaggactcgatgtcgccaatgctgccgaagagactcttgaactcatcctgggtcatgttctggggcaggtagttgacgatgaggttggtcttgctgtcgtcagtggctccatttgtaccaaggagtggcccgttgggcagggccgggccggccgggcccccccccacctgagactccatggcccccagtatctgctggagataacaggtcgcatccgctcaccgcccagtccccacaccaggggcctgcggcaatgagtggcttggtggtgatgaattagccatgtcttataggggcttcgtcatggggaggggtcactttattattctaatgatgggaataatgatgggattccatatattggaataagcattggggggaaacaaagcacctgatgtttttactgcaagaaatcccttatatgactactatatacgcaaacagaggcctaaaatcaacctgtgcatttacaaaataaaaaacgctttcacaccggaaacgctttcacgtcgggcgcagtggctcacgcccctaatctcagcactttgggaagctgaggcgggcggatcacctgaggtcgggagttcgagaccagccagaccaacatggagaaactccatctctactaaaaatacaaaattagccgggcgtggtggcgcatgcctgtaatcccagctactcgggaggctgaggcaggagaattgcttgaacccgggaggcggaggttgtggtgagccgagattgcgccattgcactccagcctgggcaacaggagtgaaattccatcttaaaaataaaataaaataaatgctttcgctctcagaaaagtaaatctaacagtagctttctttgtttttgttgttgttgtttgttagttggttgctctgtcacccagactggagtgcagtggtgcgatctcggcttgctgcaacctccgcctcttgggttcaagcgattctcctgcctcagcctccagagtagctgggattacaggtgcatgccactatgcacagctaatttttatatttttagtagagatggggtttcggcacgttggccaggctggtctcgaactcctgacctcaggtaatccacccacctccgcctcccaatgtgctgggattacaggcgtgaaccaccgcgtctggccccatttttagtagcttttattttagaaaaagggtctcgctctgtcacccaggctggagtgcagtggtgccatgaagtctgactgcatcctcgaccttccaggctcaagcaatcctcccacctcagcctcccaagtagctggaacaataggcgcatgccaccatgtctggttaattttaaaattatttgtagagatggggtctcactatgtggcccaggccggtctcaaactcttgggctctggtgatcctcccactttggcctcccaaagtgctgggattacaggtgtgagctactatgcctggcccttttagtagctttgaagcctcataagcccttccctaaacatatttatttgcctcctcccaccaaaggtaattcctatcccaaatgtgctaattatgtcttttgcttcatgcataagtttcttactagtcatttacctgccttcatctccccttgccacccccagttttcccactgagctattttgttcttttgcttttattgtataacataaaacaccttcaaataatgacaattttattttttcatcttcagtctatacctgttatctatttttcttgtcatttcaggggctacagtgtgatagtggcttctttattcctgattttttttttttttttttaaagacagagtctccctctgtcacccaggctggggtgcaatggcacgatcttggctcactgccacctctgcctcccaggttcaagcaattctcctgcctcagccttccaagtagctgagactacaggtttccaccaccacgcccgccaaatttttttgtgtgtttttagtagagacggggtttcactatgttggccaggctggccaggctggtcttgaaatgctgacctcgtgatctgcctgcttcagcctgccaaagtgctgggattacaggcatgagccaccacgcccggccctttattcctgctgttaagggagatgctttaaacattttgcagccaaacatgatctttgctatgggtttttttctagatggcctttatcgggttaagaacattttcttttattcctagatcctaagacttttttaaaaaaggatgttgaattttattgactttttttttacatcaattgaaaccattttttagctttaattaattaatttttgagacaaggtctcgctctgccacccaggctgaagtgcagtagggcaatcttggttcactgcaacctctgccttccaggctccagcaatcctcccacgtcagcctccccagtacttggggctacaggtatgcgcctccaagcctggctactttttttttctttgtatttttagtagagacggggttttggcatattgcccaggctggtctcgaactcctgggctcaagcaatcctcctgctttggcctcccatagtgttggaattacaggcgtgagccaccgcacacagcccattttttagctttaatacattaatgtcatgaattacgttaattgattttcttttttttgcgcgggaggggggacggagtttcgctcttgttgcccaggctggagtgcaatggcgcgatcttggctccccccaaactccgcctctcaggttcaagcgattctcctgccttagcctcctgagtagctggaagtataggcatgcgccaccatgcccggctaattttgtatttttagtagaggcggggtttctccatgttggtcacactggtctcgaactcttgacctcaggtgatccacccgcctcagcctcccaaagtgctgggattacaggcgtgagccaccgtgcccagccgttaattgattttctaatattaaatcaatcttgatgggataaaccaaacttggtcatgcatattgcagttttgtttatatacattgcttgatttaatttgctgaattttttggtggtttagcatttttttacatatatgttgaggaggacatgctgtttatttaattcacacaaagactctaaaatggtagaagttggctgggtacagtgacttacgcctgtaattccagcactttgggaggccaaggtggacggattgcttgagctcaagagctcgagaccagcctgggcaacatggcgaaaccctgtctctactaaaaatttaaaaactagctgaatgtgatgttgtgtgcctgtagcaaagatacttgggaggctgaggtgggaagatcacctgaggtcgggaggtcaaggatgcagtaaaccataatcacaccactgcactcctgcctgggcgaccgagtgagaccctgtctcaaaaataaataaataaagctgggggcagtggctcaagcctgtaatcccagcagtttgggaggctgaggcaggaggatcactggaggtcaggagttcaagactagcctggccaatatggtgaaaccccgcctctactaaaaataccacaattagccaggtgtggtggcacacgcctgtaatcccagctactcgggaggctgaggcacaagaattgcttgaacccgggaagtggaggctgcagtgagctgagctcgtgccattgcactccaggctgggtgacagagcgagaccccatctaaaaataatagtaataaaataaataaataaggccgggcatggtggctcacgcccataatcctagcactttgggaggccgaggcaggcagatcacctgaggtcgggagttcgagaccagcccgaccaacatggagaaaccccgtttgctactagaaatacaaaaaaaaaaaaaaattagccgggcgtggtggcgcatgtctgtaatcccagctactcaggaggctgaggcaggagaatcgcttgaacctgggaggcgggggttgcggtagctgagatcccaccattgcactccagcctgggcaacaagagcgaaactccatctcaaaataaaacaaaataattaattattaaatggtataagttaactttgctatgatagatggagaatctgaggcttaaagatgttaaggaacgtgctgaagtcacatagcctatctgctctggcattggaaatgaaatgaagaccctcggaatgtgaagaccactctacaattttcttttctttttttagagacaggatcttgctttgttacccaggctggagtgcagtgttgtgattgtagttcactgcagcctcaaactcctgggttcaagcattcttcctgcctcagtctcccaagtagctaggactacaggtgggcgccaccatgcctggctaatttttaaaaatttttttgggctagacgcagtggctcatgcctgtaatcccagcactttgggaggccgaggtgggcggatcacgaggtcagagtttgagaccagcctggccaatatggtgaaatcccgtctctactaaaaatacaaaaattagccgggcatggtggtgtgcgcctgtaatctcagctactcaggaggctgaggcaggagaaacgcttgaaccagggaggtggaggttgcagtgagctgagattacatcattgcattccagcctgagcaacagagtgagactccatctcaaaaaaaaaaatttttttttttgagccaggcgcagtggctcatgcctgtaatcccagcactttgggaggccgaggcgggtggatcatgagttcaggagttcgagaccagcctgacccacgtggtgaaaccccatctctactaaaaatacaaaaattagtggggcgtggtggcacacgcctgtaatcccagctactcaggaggctgaggcaggagaattccttgaacctgggagacggagtttgcagtgagctgagatcgcgccattgcactccagcctgggcgacagagagagactctgtctcaaaaaaaaaaaattttttttttgtagagatggggtgtcactatgtcgcccaggctggtctcaaactcacagcctcaagcaatcctcatgcctcagcctcccaaagtgttgggattacaggcatgagccactgaacctggcccaattttcttactgtaacagtcaaccaggctggtactggctctgacaactcactatgcgtctttggatatgcctgctagggcctctgtttcactttgctgaaaattcagaacaattggcaagggctatatgaagggctatgtagaggagaattttaaagccacttcagaaatcagcagcaaacagtgctgggatttgactgaccttatctgtcagggacataagaaggtcaagtagccagcatttccttacatcttcttcagtggcacagttggcacataggtttaccctcacttgaaaacctgaactgggccaggcatggtgggtcacggctgtaatcccagccagcactttgggaggctgaggcaggtggatcatctgaggtcaggagtttgagaccagcctggctaacatagcgaaactgtctgtactaaaattacaaaattagccaggtgtggtagtggacgcctgtaatcccagctactcaggaagctgaggcaggagaagtgcttgaacccaggaggcggaggttgcagtgagccaagatcgcaccactgcactccagcctgggcgagagcaagactccgtctcaaaaacaaacacacatactgattggtagtgtcttcctagaggaatgaattaagaagaattcagaaaccacatttaggcaaggcgtgctggctcatgcctataatcccagtactttgggaggccgaggtgggaggactggttgagctcaggagttcaagcccagcctgggcaacacagtgagatcttgtctctacaagaaatttaaaaattagctagtcatggtggcttgcacctgtggtcccaggtactcaggatggtgagacaggaggatcacttgagcccaggaggtggaggttgcagtgagccatgatggcaccactgtactccagcctgggcaacatagtgagacactgtataacaaaaaagaaaaagaagaagaagaagaaggagagggagagggagaacgagaaggagaaggaaaaggagaaggagaagaagaagccaggcgtggtggctcacgcctgtaatctcagcactttgggagaccaagggggggtggatcgccagaggtcaggagtttgagaccatcctgaccaaacatggtgaaaccccgtctctactaaaaatacaaaaattagccaggtggggtggtgggcacctgtaatcccagctatttgggaggctgaggcaggagaatcacttgaatccgggaggtggagattgcagtgagccgagatcacaccattgcactccagcctgggtgacagagtgagactctgtctcaaaaagaaaagaaaagaggcagggcgcggtggctcacacctgtaatcccagcactttgggaggccgaggcgtgtggatcacgagatcaggagatcgagaccatcctggctaacacggcgaaactccgtctttactaaaaatacaaaaaattagccgggcatggtggcgggcgcctgtagtcccagctactccggaggctgaggcaggggaatggtgtgaacccaggagacggagcttgcaatgagccgagatcgcaccactgcactccagcctgggcgacagagcgagactccctctcaaaaaaagaaaagagaaaagaaaagaaaaagaaaaagaaatcacatacagttttcagtaggaaagatcactgtgattgattagcaatgtctgctgtggccacacaactagaaacagccagcaggtacatattatctcaaccatccctgactcaagctccaatatcttaattgttcccaaatattggctactactgtgtgccaggcactgtgcaaagcactctacatgcaagttttctgttcttattcacaacaatcctaaaaagagaatttttcctcccccacttcacccccacttaatacatgaggaaactgagatattttaaaaattgccaaagatcatgcagcatataaatggtggaacagggatttgcatatgagtttttctgatccagagtgtgcatttccaacttccactgccaaccaagaacagtgccagctctaacatttcccagctgtgtgtcctcagatagactacttagtgcttctgagcctctgctccattttgctgcaaactccaaattatagtcacactggcctggggtagtagctaaagccatatgctgtaaagcatctggaattggttagttacgtctgtcatgggcatgatcatgggaattaaaagcaggcttgtcacatccatcatccgtacctcataatacacctacattatttattattattattagagacggggtctcgctctgtcacccagactggggtgcagtggtatgatcatgactcatttcagtctaaacctccggggctgaagtgattcttacacctcagcctcctgagaagctgggactacaggcatgtgccaccatgcctggctaatttttttaattttttgtagagatgggttcttgctatgttaccaggctgatctcaaactcctggcctcaagtgatcctcccaccttagtttcccaaagtgctaaggattcagttgtagccaggcacggttgctcacgtctgtaatcccagcactttgggaggccgaggcaggcagatcacgaggtcaggagttccagaccagccttgccaacatggtgaaaccctgtctctactaaaaatacaaaaaaattagccaggcgtagtggtgggtgcctctaattccagctactagggaggctgaggcagaattgcttgggaagcagaggttgcagtgagttgagactgtgccattgcactccagcattgcacaccagcctgggtgacagagtgagactccgtctcaaaaaaaaaaagaattcagttgtgagccaccatgcctggcctattattcttttatttaaagatggggtctctctatgttgtccagcctggagtgcagttattattcacaggtgcaatcgtagtgcactgcagcctccaactcctggactcaagcaatcctctcatctcagcctctcaagtagctatgactacaggcatgtgccattgcatggggcaatactgctattttattttattttatttttttgagacggagtcttgctttgtcgcccaggctggagtgcagtggcgcgatctcagctcactgcaactccgcctcctgggttcacaccattctcctgcctcagcctctggagtagctgggactacaggcacccaccaccacgcctggctaattttttgtatttttagtagagatggggtttcaccgttagccaggatggtctcgatctcctgatctcgtgatccactgcctcggcctcccaaagtgctgggattacaggcatgagccaccgcacccggcctaatactgctattttaatgagcattccactacactgagcatctactgtgtgccaggcactgtgggaaatactttgaggcatattttcagttactctcccaacaatcttaaaagactgagaacacattctccattttacaggtgacaaaagtgaattcagagacgtatgaatagggaaattcatttcagtcctggatctgtttgcagagctgtttttcatcattatggccaatgccttgtctcgctatgttgcccaggctgaccctgaactctcaggctcaagtgattctctcacctcagcctccccagtagctaggactacaagtgcaattcatcatgcccagctaattttttattttttgtagagatgggatcttgctatgttgcccaggctgttctcaaactcctggtctcaagggatcctcctgcctctgccttccaaagtgttgggagtacaggcatgagtcactgcacctggtcaccatctactttttttttttttttttttgagacagagtcttgctgtgtcacccaggctgcagtgtagtggcacgatcttggctcactgcaacctccacctcccaagttcaagcaattctcctgcctcagcctccgaagtagctgggaccacaggcgcgcaccaccatgcacagtgaattttttgtatttttagtagagacaccgttttgccatgttagccaggctgatctccaactcctgacctcagatgacctgcctgccttggcctcccaaagtgctggtattacaggcataagccaccacgcctggcccatttactcttgtaaaacagatggcacagaaggtcagctcccctgcatctccaattggctgagttgctcctgggagggctgcctggaggactactctgaagacacatccggcctcaaaaggaatatgcattgggttgattagcaatgtctgcaaggcacccgcagtgatgcagtaacatgcactgcacagctctgcattcccgtctcctaacattaatacttaactgatcgcgtaaccatgtattgaggtgcctgttgtgtgccaggaaaaattcctcatgtgaaacttccaggtggttctcctgccgttgaacatgatgagattcctttctccatttaatacacgaggaaagagagtctcaatgaagggacagggtgactggggaggctgagacaggaagatcatttaagcctaggagtttgagagcagcctgggcaacacagtgagatcttgtttccaccaaaaaatttccaaaaaaattagctgagtgtggtggtgcatgcctgtagtcccagctacttgggaggctgaggtgagaggatcaacttgagcccagaagtttgaggatgcagggagcgtgatcatgccactacactccagcctaggcgagagggtgagaccctgactcttaagggaaaaaaaaaaaaatgaaggaataggaacagagttgcataggcggcaaatggtgaaacaagaattcaggctgggcttggtggctcaggcctgcaatcccaatactttgggaggcctaggcgggaggatcacctgaggtcaggagttcgagaccagcctggccaacacagcgaactctcatctctactaaaaatacaaaaattagccaggcatggtggtgggcacctgtaatctcaactactcgagaggctgaggcaggagaatcacttgaacctgggaggcggagcttgcagtgagccgagatttcaccactgcactctagcctgggcgacagagaaagactctgtctcaaaaattagaaaaataaaataaaaaataaaaaaaaaagaattcagttccagggtttggactttagagcccactcccctaacgaaaagaccagtaatataataacaaaataataacagcaaagcgaagctgagtacctgctctctgccgtgccctgggcatcatgacatttaaacccactccatcggttgagtctattaattcaattcaacaaatatttactgagggctacacatgtcagactccaccctcctcatgctgtcctctgatagttaggtcacctctctatgcctttctgttcttccttaaggaaggtatggcacagaggtctcacatgtatggagctggattctgaatttgcatcctggttcattaagagttttgtggggtttttcttttccttgtttatttttgagacagggtcttgctctgttgcccagtctagagtgtagtggtacgatcatggctcactgaagccttaacctccttctgcctcaacctcccaagtagctgggactataggcttgcaccacccagccggctaatttttctctttttctgtagagatgaggttttgccatgttgcccaggctgcgatcctcctgccttagcctcccaaagtgctgagattacaggtgtgagctccaccatgactggccctggagatggattctgaatttgcatttaagctcattgaggtaagagttctatgttgagttgctgatatttgctataagagcccagtgagcagttggcagtacacaagccactgcttctggacatgctagatccctatttttttttttttttttttgagatggagtcttgctctcttgcccagcctggagtgcaatggcatgatcttggctcagtgaaacctctgcctcccgggttcaggcaattcttccacctcagccaggtagctgggaccacaggtgtgcaccatcgcgccccgctaactttttatatttgtagtagagacggtgtttcaccatattggccaggctggtctcgaactcctgacctcatgtgatccacccaccttgggctcccaaagtgctgagattacaggcatgagccaccgtgctagatcctatttttgaactccactgagcatgtgcaaagttttcattgacctcccacaaccacagtgaatggtatgaagggtctcctccatttctcagatggggacactgagggttagtcacagggacctatgacttgtccagggtgacaggaggaggtggaggggatggtgtcaacatctgactcctgatccgatgaccctagagccgaaagagttactggctgcccccctcccatggtgtccccaacctgagcagagtgaagaggtgactgggtggttcagacccaggttcttgaggcctagcctgctaatctggccaccacccgttctccctcccatttgtgccagagcttagcgggaccagtatctcgtttcctctgtggctgagccggctgagctgataatggggatcagattgatggaagccacacccgccctgccccagcctgcagtaagtgcacagcctgggatggtggctacatgggcatcaaagggacttcggcgactggccccagacagagatgggggggtggcaaagtcagggaggaggagggcagataaaagatggagggttagggaagcttcccattctctccagtgcttcttctaagtctcccccgacttttggtttctctctccctctttcttcctctgtttccctctcttctccactgtcctgccctctctctgaaccgttctgtgtccctggcctcatcactctctcttcctcttttccaccatcgcacatacatctgacgtatgggttttgcagtgaacacacctgaggccacttttttcttaaaacctcctgtgtctgacccccacggcccccagctgcggcccctggccccagtcacagtgacagatgcctggataccggcgacaatagggcattgagtggctatgcatggtgaggctgggctaccacgtggtgctgactgagcctcctacttctgggcccttcttcaatgcagggtcctcctggtcttaatttgtcacctctcttcctcccagcctgtccccatgatacatctctgccccagggctcgctcactggagaacctaggtcctcaaggcccttgtgtgacctctgaccacaccctctttccctttgtgcattagtttcctttttcaaatgagagaaccgatcagaggacgcttaggagatgctggactgttgcgggagttctgaggtcctcaggaggccacactccagttcccagacctgggtgaacagcacgaggcccagagagggaaaggaacggcctgaggtcacacagcaggtgagccaggcctccgggacctcatttctcagagccaggtgggcgggtcccagggtccaggaggggagaggcttaggcatggagggagcgccaatcatgcccccacccccagtgctagccacgactcgaaaaaggggcccggaaagagacacaatgcacagagacacacacgcagagacggagagataggaagagtggaagagggaggcccaggcgccgggaccagacaaaggacgcgcggcggcgcggggagcggagtcgcgcggcaggggcgggggtggagccggggtggggctataactggccagccccgcccccgggatacgcccgggctgccgagtgggaatccgagggctcgggcgaggccgggcccccggggccctgggggcggggcctagatgggcgtgcccgggcgtggccaggcagggcgtggcagggcgggaggggctgcgcgctcgggagctgaccagctccgtggctgctgaaagcaccgagcgcggggctagcggtgcgggcgagcaggcgggcgggccgcgctcaaggtcacctcgcggcccagagccttggcgaggtggggagcctggacctggcctaagggggctgtctcggcctcccaccccatctcccggggggcggagacccgggagcccagaggtgcccccccaacccgcgggccctcctctcccctccccctccccgcagcccgaggcgcccgcgcgaggctgcggcccgcgaagaagcgccgagaaacaaagggacgcggcagcagcggcggcgggcccgcggggcctccgggcgcgccccctcctctcccctccccgcttgccgcaaggtcgacgggctcgaggacgagacgcccgcctcccgggtgcggccgaggcccggggcgcgcgatccgacgccacccgctttcccagggctctcggggacgctttgtcgctttggcttggcccagcaccagtgatcgggccctgcgtttgcctgggcggcctgcggggtctgggcctggatggaggaagcatccttagccgccgcggcccctcccccatcaggcctgctggagagggggcaatcccgcctccagggcggcgtcggacgcctcccgaatcgcagtcagtctccctaaggccctctcagaccaagctctaagcgccctcagcactctgggcgcggccctgcccactctcaggccccgaggcttggtcctacccccccaacccgggcctagctaggcctggtcctaccccccccgccgcacccgcccaatctccgcggagcctgggcccaactcctccccgtcccgattccctttcggcgacaggggaatacctacagtgaccattcttgtgtgcccggcgggcgcggtccgtgttgaggggggctccgggggtggtgcactcctaggggggcgcccgatgctcacgctggggtcccgcccgggcggcctctggtgcggccgctgcagatgtggcgatgaaggcggcggctccctcgagggccagggacgggcccgaacccggggatgcgcgcgcggatggccgggccccggggtggcctgcgggcggcaggggatggaaagagggagcgggcgcggggttgaggacgccccctgcgcggccccgcggggcccggggaggttgcgcttcccgacagagatcgcggcgctctgcctttcgccgccgcccctcggtcggtcctgtccggtcccgtgtgttcaagtcctctcccctcgcccaccctccctccctccctccggcccgcgctgcgcgctccgcgctctggaccgcgccgccgccgcccccagccctttatagcagcagctgccagcgccggcgtcgctcattggctgcggcgaccgagctccgcctcctcgcggctcccgacggcgcggcaggtggaagtgagcgcgcactggtcgggactctgaatcccccaaaagcgcatcctaggtgctcgggttgccagatttgggccctccttccctcgaggcccttgcttcctaccctggcaccccttcttgggctggctttcgggccaggagacgggctcccctcctccgtccagctcctagagctggaggagccaacagagcgaggaggtattagtggcctgaatatgcgaccttccagaggtgttgtccactgagggaactggacaggggatcaggaaccaatattttagtaggcagaggcctgggtccccagatttggaggcaccagtgtagaccacctcaagaccacgggggagggtggctactgtggccctagtcttctgcagaaggagactgggacgctgttggttttgagtgagctggatccttctagggttcaaaaggtaaggactggcactccccagtgcaaggaaactccgcactgctccgaagggggtgaaaaggtttggggctcagtgttctggacaatcatcgctggagccatgcagctctgggaaaccacggatccttcttggaccccacagaactggggtgggtggatctgccacataaatgtcctggctttctaggctcgtgattggtcctcctgactgtggagtcatgctcgctctctgctagggggaacctggcctctctctaaggcgttgggggtggcgcagcctcctttggtgcgcgggcgccggtgcatgtttacgtcggggcgcgggaactagcacacactggggcggggtcgccagggcgtgaggcttcagcaccacagacagcaatccgacagtccggtcgagggcgctgccggcgaggtagcccagaccccctaactggagagcggcagtccccacccaatcctcgttcctgcacgccctttaggctccagactgtcagagagcgccaccagcgaggagagcctaatttgcccaatcaggggcggcccttgagataaccagttactggaagatgccctagagatcgagccaatgggagtgcgcgcaccaggggatgctgccacgcctggaaagggcaggccaatcgcagtggcccgcgcaataggggcggtggcggtgcagatccccgggtggcccctcttgggctcgccggggcgacctggctgcgggcgctaggggccccaagcgatggtctgttccccaccccgtgttcctcccggtttccgtcatcggaaactgagctaggaggggggctgctcctgggcgcgcggaccccgctgcggttcccatggaaacctgccggctccggcagtgcggggagagtggaggggacctgcctcgcggggggagggagctcgcgggggcggccccagcggccggactcgctcatccttgccgattcttctgtccccggctggggtagccccccggtccgcagcaggaactgaggcatagctggggccccgcctcatcccccgaactggtgaggaaccggcggggccaatctgcgcgtggcgccacagggctcccccgggcacgtgcctgagctcgcggctgcggtccccagggtcacgtggctgcggccaccagggcctacgcgcctcgcacgccacctagcggccgcgcctcgctccccgcccctctctctagcggcccgcaggaggcggcggcctcagcatcctcctccgggaaatggggccagggcagccgccgccaactccccttccccccgcggcttcctgttttaggaacacgccgagctagttctacctcggggttttggcactggttgttcctctggcctgagaatttcctcccccagctttcttctgggatagatctttgtcattctggtctatgcgcaaatgccacctcctcagaggccctccctgaccaccgacctaaacagcatccccggaaaacaacgcatcactctctcttttgcatggcgcttgtcgctagctgcaaatgtttctcattttaggggtttactgaacacctccccatctcatcccggagctcactgagggtgggagatgggtgccccataaaacaggaggaagtggaaattagggtcctgagttccgggagatgcccagagaccccagacccccaagcctcaccccatcctgtgggagcaggggctgtgcgaggctgctgggcccaggggcatccctcgttccctgcctcgcttaggaagggatcaagtaggctggagacagagaggggcctggcaccccaaatcattcaggcctaggggaagggcatctcctttctcgctctttaatctcactctgctctcttgacacagttccagcaatgcagccccaggcaccagctccgagaaggatgcggtggggcggggtggggaacctgcccagggggcccagctctggggcggggcgggggcgcctccttccggcccgcggtccgggcggccctcgcagctgtccaggccccggcaagcccgggcgtggtgtccgagcggacgaataaataggggcggtcagtggtcaggtgggtcaggtgggcttgtgatccgggtggcttttgagcgtgtggaacttgacgctgtccagcttctcgaagcgcttcccgcagcgatcgcacgtgaagttgtactgcacctccgcagtgtgcttcttcatgtgccagttgagcgacgcgcgctgccggcactggtagccacagatctcgcacctgccgggagcccgtggcgggacggggcggggtcagagtgggcggggcggggcggggccctacaaggccgagcgcaggtggaaccgggcccagacactgcgttggggcgaagccgcccctgggacctgctgggatcccctcccacccaatcctctagcggcacggggcggcctgtcactcactgcaggggggtctcgccggtgtgggtgcgccgatgtacctccaggtggttcttcctcttgaaggacttgccgcaggtctcgcaggtgaattcacggacacctgggggcggtggggaccgaggctgaggacggtgggctatggggtgtctctgatgtgctgcagactctgatgctagaaggagcatcaggctgtctccttggatctcccaggactgcaggtgcaggccgaccaaaccctacgtccttcccgtgcatttgcccacagacgccatcaagcagaactgagatcgaacttgggtccctgagaggcatagggtgcacactaccaagccaacatgggtctgaatttgtcttgtgtgtgtgtatatatatattttgcgacggagtttcgctcttgttgcccaggctggagtgcaatggcccgatctcggcttaccgcaaccacaaccttggtctcgcgggttcaagcgattcttctgcctcagcctcctgagtagctgggattacaggcatgtgccaccaaccatgcccagctaattttgtatttttagtagagacggggtttctctatgttggtcaggctggtctcgaactcctgacctcaggtgatctgcccacctcagcctcccaaagggctgggattaccaccacgcccggccttgtccctgatatttgaactttgggtgatttcgcaaaatgaaaacaaaaacaaaaacaaaaaaaacttctgcccagcacggtggctcacacctataatcccagcacttagggaggccaaggtgggcagatcgcctgagatcaggagttggagacaagcctggctaacatggcgaaaccctgtccctactaaaaaaaaaaaattagctggcatggtggtgagcgcctgtaatcccagatacttgggaggctggggcagaagaattgcttgaacccgggaggcagaggctgcagtgagccaagatcggattccagcccgggcaacagagtgagactctgttgcaaaaaataaccacacacacattaaaaaaaaccaaaaaaaacaaaaaaaacccccaaacttctgacctcctgtgatatcagaagctctggccctcagggcatgccctatcgctggacacaggcaccatggctctccactatgtccccagcccatgcagaagacctgcatctctgccacaagtggaaacagaagcccagtcccaagccagctgctcctctttgcccagctctccttcctgctgctgcttgggtgggcactggtctagcctgtggccccaggtgctgctataggttccaatctggaagagcagtggcggtgtcagctgctccctaagtctcgcatgagacctgctcttgggatcatggggcatggggtcgcggggataggagggaagatggccagccccacccaattcctgtgattgattggtaatagttcctgtcgctgtggctcacatagctacagcttactgaggacagggaggaggctcctaggggtgtagtcctgtgcccggagacccagcactgggctttgacccgccagctctggcccaggctcccaggcccatgtccctgtgtcccccgctcatgctgccagctggcccagggcctgacctgaatggatgatcatgtgccgccgcaggtggttggataaatagaacttcttgccacagccaggatgagggcacactttggtctttcctttccgatgcacaagattgacgtggttctggagacgagacaggcagaagtgggtcccataggcccacagaaggggctctgggaggtggggagagatgagggcagctggaaggcaggctggggctggcctccccaggaggagggaagaggggtacccttgcccagctcagagattcccaggggcacaactggggtcaaagggtagctttattttttttattttttgagatggagtcttgctctgtcgcccaggctggagtgcagtggtgttctctcagctcactgcaagctccacccccccgggttcacaccattctcctgccacagcctcctgagtagctgggagtacaggcgcccgccaccacgcccggctgctattatttttttctgtattttttagtacagacagggtttcaccgtgttaaccaggatggtctcgatctcctgacctcgtgatccgcccacctcggcctcccaaagtgctgggattacaggtgtgagccaccgcacctggccaagggcagctttattgaacacctactatatgccaggctctggactggggtatctgtcaactctgtgaagggcccagctgttagcccaattaatcgatggggaaactgaggttcaaggctctgtggtttggccaaggtctcacaggtggccagtggcaggactgggactggatttgagggctatcagcctctgtgggcctggaacaggcagccccaattgattcattcctttgttccttcactctttaacttactagaacaaccctggctccagcttgcaggcctggcttgcactaagtgcttaatacatgctcaatcaatgcatggcatggcacaaaggcctgttgttgcatcctcccatgccaggtcctggggtgtgacaagtccctgtctttgccttcagggacacctcgtcaaatttcaaggggcaaactagaggtaggacatcctggtggtgccatggcctgggccttgtgggcctggcccaggctgctccgggtggcggcctcacctggaagctgctgagggccacgtagacttggctgcagccctcgtatgggcagtggaacatctcgagcaggccgtcagcatccatcacccgcgaccgcttgctccgccgcctcctggaggggaaggggccatgacatcggggctcccgcaccaggcaggctgggggcctgcgggccgcttctagccctcgccctcacccttgcccgccccggcacccacttctcaggctccttggggatttcatagatgatggctgacatgtcgctgccgtccagctcctccccgtccgcctctgcctcaggctctgcgctctcaggcaccgttgttgccagctccggggctactggctcctccttctcctccttctttagcaagcacaggtcctccttctctacagggtggacacagggtggtgtccgcaggggacgaaggctgccgaggtgcccacttcgagggccattcctcgcccggcccctcccaggcccaaccacccctggccagaggccacgacaggtcccccagacctttcttggtctcgatgcctgctactgcggtggcgtccatggtgctaggctggctaccctcgggctctgtctgggtgtaggctgccacaccctccatcatggcacagggcacctcctcgcccagtccactgccggggacaccgctgcctgctgccatgttgaggtgaatgccctcggccgtgagagcgtcgtaaccagggcccgcaatgatgatcacctgtgagccgggcaccatgcctggcatggggcagctggccaccacctcacccagggcctcctggggcacgttctcaaagagggcgctggggcccgcacccacttgcacaggcaccggcacgcacaccactgtctccagggcttcaggcccattgcctgctgggttggagcacagcggggtaccctgctcggccaggctttccacgtggtggacgtcaaagggaatgtgcacgccctcctgagtgatgagcccgctgctgcccaccgggctggtgggcgtcgctgccgctgccgctgccgcagccttgaccggctggccctcaggagactcctcagagtcagaggcagagccagagctggatgagtcagagctgccagccaccagcccattgcccactgtggggacagaagaaagggagtggttatgatagctgcagccactggtatttgtttatttagtttttattttattttatttatttatttatttatttttttgagacagagtctcactctgtcacccaggctggagtgcagtggtgcgatctcagctcactgcaaccttggcatccccggttccagtgattctcctgcctcaggctcccgagtagctgggactacaggtgtgcgccaccacacctggctttttttttttttcctgagatggagtctcactctgtcacccaggctggagtgcagtggcgcgatctctgctcactacaagctctgcctcccaggttcatgccattctcccacctcagcctcccgagtagctgggactacaggcatgtgccgccatgcccggctaatgttttgtatttttaatagagataggggttcaccaggatggtctcgatctcctgacctcgtgatccacccacctctgcctcccaaagtgctgggattacaggtgtgagccaccgcgcctggcccacacccggctaatttttgtatttttagtagagacggggtttcatcatgttggccaggctggtctcaaactcctgacctcaagtcatctgcccgcctcagcctcccaaagtgttagaatgacagtcatgagccaccgtgcctggctgaatttttcttttcttttctttttttttttgagatggagtctcgctctgtcacacaggctggagtgcagtggcgcaatattggctcactgcaagctccgcttcccaggttcacaccattctcctgcctcagcctcccgagtagctgggactacaggcaaccgccaccacgcccagctaatttttgtatttttagtagagatggagtttcactgtgttagccaggatggtctcgatctcctgaccttatgatccgcccacctcggcctccgaaagtgctgggattacaggcatgagccaccgcatccggcctgagtttttcttttttttttttgagacagagtttcgttctgtcacccaggctggagtgcaatggtgcaatcttggctcactgtaacctctgcctcctgggttcaagcgattctcctgcctcagcctcctgagtagctgggattacaggcgtgcaccaccacacctggctaatttgtgtgtttttagtagagatgaggttttgccatgttggccaggctagcctcaaactcctgaccttgggtgatccatccacctcggctccccaaagtgctagaattatagtcatgagccaccacatctggcccgattttgtttttgttttgagatggagtctccctctgtcacccaggctggagtgcagtggtgcgatccgggctcactgcaacctctacctcccaggttcaagcaactcttgtgcctcagcctcctgagtaaatgggattacaggtgcatgcaaccacacctggctaatttttgtatttttagtagagacgggattccccattttggccaggctgatctcgaacttctgacctcaggtgatctgcccgcccgggcctcccaaagtgctggaattacagacatgaggcacctcgtgtggccctgattttcccaagtagagatcaggtcttgttatgctacccaggctgtggccttgaactcctgggctccagtgatcctcccacctcagcctcccaaagtgctgggattacaggcgggagccaccatgcccggccagcagttggtatttgttgagggctcttcaggggctagacactgtgaccctctcactgcttaaaacagcagtcacttctcaatccccactgtccctaactgttccaagatgactgacccagctgaccacccctactccaggggacactctcctctcttagcccccagacccacgctgtggtatcctgggcccttcctggtggctccttccaagtttatttggttcttgcaggcctggaaggcttggcctggggcctctcctcagcgctcaccttacccccaggcttgcccaggctaatggggttaaaggccaccctccgattctcgatgccaactgaatgtccaataattcaatccaatctgacattatcttcccggagtgggcgtcaaatcctccaagttaaaggctcagtcccacaagaccgccggacttcagatgtcagctgcaagtcctgggctaccctgtatgtctgaccaatgggctctaaatggggggtttccatgaccccatcctcaggtttgataatttgttagaacaactcacagaactcagaaaatggctctacctacaattacagctttattacaaaggattcaactcagcgacagccaaagggaagagatgcacagggcaagatacgggggtatggtatgggcttccatgccctctccgggggtaccaccgtcccagcatctcaatctggaactgttcaccaatctgggactgttcaagagggtttttgttgttctgttgttgttgttgtttgtttttttgagacagagccttgctctgttgtgtaagctgtagtgaagtggcacaatctcggctcactgcaacctccgcctcccaggtttaaaaaattctcctgcctcagcctcctgagtagctgggactacaggcacacgccaccatgtcaggctaatttttttttttgtatttttagtagagatgggttttcatcatgttggtcaggctggtctggaactcctgacctcaggtgatctgcccgccttggcctcccaaagtgctgggattacaggtgtgagccaccgcgactggccaagtatgtattcttattactacaaccatccatggcctggtgattccatctgcagcttctgcctacacctccatgtcgagctccagattcttccatctcattggccccctaagagtgtctcacaggcatctcaaactcagatctgcaacactgggctctgtatcttcccttctacaaagcctgcactgctcacgggtgtccctgactcagcggaaggcagctcagtctctccagtggctcaggccaaagtcctggggctcttgttgacttctctctctctcacacccacttccaatctgtcagcaaaacctgttggtgctgcatccaaaatacatccacccgcagcctgaacgcttctcccacttcccctgcagatgctagttgcggccccaccggccccctgccagggccagtgcagtcccttcttttgggtccccggctcctaagaacctactctttacctcctgtgaaagaagcaggccagctactcactaaatccctctcttcctggcaccagcaccgactacatttcccagcatctcttgcaggtaggtgtggccatgtggctgagtcccagccaatggaatgcaagtggacaggtgctcccaaggttgagtctccacttttctccccaccagtaagccaggacccacaaggaggctggagccataggaaggaaagaacctgggtccagggatgaaaggcagtctgcaggatggaagcaccaggctttgtatgtgggaaacaaaccactgtgccaggtcacgagagctggagtgcgtctgtttcaggaggtgttccatcacctcctgtcctcgcctcctctcctaatgtccttggagacactagataggttcctgcctcaaggcctttgcacctgccattccctcggcttgaatcctctttttttttttgagatggagtctcgctctgtcgcccaggctggagtgcagtggcacgatcttggctcactgcaagctctgcctcccaggttcacaccattctcctgcctcagcctcccaagtagctgggactacaggtgccgccaccacgcccagctaatttttagtagagacagggtttcaccgtgttagccaggatggtctcgatctcctgacctcatgatccgcccacctcggcctcccaaagtgctgggattacagacgtgagccaccgcacccggccggcttgaatcctcttctgtctgacacctgagagggctcctccctcccctccatcagatccttcattaaaggtattttttcagggggaatttcctgaccattctgtctcaaatagttcctttttccctcctttattttttcccaaagcacataccaccttacagtgcactctatattttattttatttttgagatggagttttgctcgttacccaggctggagtgcaatggtgcagtctcggctcactgcaacctccaccttccaagttcaagtgattctcctgcctcagtctcctgagtagctgggattacaggcacaccccaccatgccccgccaatttttatatttttagtggagacaatgtttcaccatattggacaggctgcgaactcctgacctcaagtgatccactcaccttagcctcccaaagtgctgggattacaggcgtgagccaccacgcccagcctgtattttaattaatttatttttttgagacagtgtctccctctgtcacctaggctggaatgcactggcacagtcatagctcactgcagcctcgagctcctaggttcaagcgatcctcctgcttcggcctcctaaagcactgggagaggtgcaccaccatgcccagctaactttttcatttttttgctagagatggggtctcactatgttgcccaggctgttctctaagccgtggcctcaagcaatcctaacttggcttcccaaagcactgggattacaggcttgagccactgtgcccagcctgcactctatatttttattggtttatcctgcttacaatccgcttcccctctagaatgtaaactccgtaaggttgcggggtcccggtgcagagcccccagtgccgagaaggctgtgtggtgcacagtgagggctcgttccaataaatgaatcaatctctgctccctagtcttggctcactgcagcctctgcctcccgggttcaagtgattctgatgcttctgcctgccaagtagctggaagtacaggcacacaccaccacacctggctaattttttgtatttttagtagagaccgggttttgccatgttgcccaggctggtctcgaacttctagcctcaagtgatccacctgccttggcctcccaaagtgctgggctggcattacaggtgtgagccactgtacccggccctcgggagtgtttttttttttttctagacagagtcttgctctgttgcccaggctggaatgcagtggtgcgatcttggctcactgcaacctccgcctcctgggtttcagtgattctcctgcctcagcctcccaagtagctaggattacaggcatgcgccaccatgcccagctcatttttgtatttttagtagagatggggtttcaccatgttggccaggctggtcttgagctcctggtctcaagtgatccacctgcctcggcctcccaaagtgctgggattacaggtgtgagccaccgtgcccagcctttgttttgggtctttaatgagtaaatatgtataagggtttaggacagtaggagattaaaagtatgtaccctgtaagtttcctattattatctcagtgccattcagggcagtgagatgcccactgttgatggacctggggtggcagcagggttggggataaggaggatcagcccctctttctggataatttccccttgtcctgtattctgcagggtgggcaaactctctggcaccatccagaaggagggcgcagtgtcctaatgagtggagggaagggccagagcacgcgtctgggtccacctgactgcagcacctgctaagtttggctgaccccagacttctcctcaggtaatgacagcaccaacagaaatagccatgggcaaggcccggtggcatatgcctgtaatcccagcactttgggaggccaaggcaggaggattactagatcccaggagtttgagaccagcctgggcaacacagtgagatcccatctctacaaaaaatttaaaaatcagctggctgtggtggtgtgtgcctgtgttcccagctactcaggaggccagggtgggaggatcacttgagcccaggaattggaggctgaagtgagctatgatggcaccactgcactccagcctgggcaaccgtgagaccctgtcttaaaaaaaataaataaaaataaaaagccaggtatggtggctcacaccagtaatcccagcacttagggaggccgaggcaggaggatcacttgaggctgggagttcgagaccagcctggccaaagtggtgaaaacccacgtctactaaaaatacaaaaattagctgggcatggtggctcacgcctgtaatcccagctactagggaggctgaggtgagagaattgcttcaacctgggaggcagaggttgcagtgagccaagatcgcaccactgcactccagcttgggtgacagagacagaatctgtctcaaaaagataacataacataacataacataacataacataacataacataacataacataaaacataacataacataacataacataaggccgggtgcagtggctcacgcctgtaatcccagaactttggaaggccgaggtgggtggatcaactgaggtcaggagttcaagaccagccggccaacatggtgaaacccagtgtctactaaaaatacaaaaattagccaggtgtggtggcagatgcctgtaatcccagctactagggaggctgaggaaggagaatggctggaacctgaggcttggcttgcagtgagccgagatcgcgccattgcactccagcctgggcgacaagagcgagaccctgtctcagataaataaatacatacataaataaataataaaaagttgagttggggcgtaagtaagctgctctgggcaccacccacaccccagcctgacccatcaccaaatgggccagtcagatcactcctggggcttgggattccttgactgccaagtggggctgatgacaaggccatggggaagattcatggtggctctgggcagggccaggagtggcacacagtgagggggcagtaaaaggcagaggagggcggaatgcagatcatgggatggggcagccgagaggccactgcacgctgagagcctggccgacacttggtgggacggtcgttggcgggggcgcccacccggaacacctctcgcccccggcttcccctcggccagctgggatgccacctgctccgagatgccagccagcgcaggctcagccctggtgaccgccccaccctcagccctgacaggacgcctggcagtgtgccctacgctccttctccagccattgccgaacccctgaggctgccggcagccccctcaccactcaccggggccaactgagcctccctcactgagtccctgccccgtgggatgggaaggagagaggcagggaccgcgaaggtggggagggaggaggagaaaggggaatagaaggaaacaagagaaagagagagagggagatgagacagaaaatgaaagatcaaggaaggaggagacagaggcagctcaagggaggagaaatggggaacaggagggaaacagaatggagggggaaggcaagaaacgaagcctggaaaggcagaaggcaagagaatgcaactgggagccagagaaaatcgaaaaggaggtagcggccagcttagccagggctcaggagagcatcacagcctatgaagccataaggcctgggtggtttaggcggccgtttcgctgtgggggccgagccctgccccagcaggcctgcccccgccccagctgccaagccagggctcctgggccctcagccagccctgcctgggactggccttgggcacagattggcaaactgctccataaagagggactgcctccccactcaagctctgtaaggacgcaaagagggcaaggccacgaaggactcagcctggcccatcgtgtccctgctctgccccagtgccagagccagagccagagccactgtggctgctattctgtttgtgatgctagcctagggctcgtaagaagcccccagaaatgggcggccccctatgtgccctcgccctgcagacctacctttgtcactgtcagggtctgagtcgctgaggggcttcaggggcgaatgcaggtcctggaagtagcggtggccagcttcgcactgccacacggccgtggtgtacaggccaaaagtggggtctagctccgccaggtgcggctcgtacgggcagcggtgcttgtggtcctcgtaccagatcaccacgttcttcaggcagttcacgttgcgtcgccgccctatggacacagggccgaggagtgggtataagggacagggctcagcccatggtgacatggctgcctgaaccaccggggctttatgggtcccatgggtttggaggccctcctgagtaccatccaggcctgtacccagtttaaagggggaaactgaggctcagagaggagaggcaccccctggaggtaacggggactgttctattggcaaagtcatgtaaacagtggagcctggtgcacagtaggtgcataataattgttagctgcttgttaattgttctcatcttcatcaaacgcctagaccagcgcagtcctcaggcccaggactcccaggctcccgccctaaccaccccctacagccgcaagggggcgcctgtgaatgcccgagtcaagtctgttccctcctctgctcagaatccactgggccaggcgcaatgactcacacctgcaatcctagcactttgggaggcagaggcaggcggatcacttaaggccaggagtttgaaaccagcctggctaacatggcgaaaacccatctttactaaaaatacaaaaattggccggcatggtggtgtatgccttttgtcccagctacttgggaggctgaggtaggaggatcgcttgagcctgggaggtggaggatgcagtgagccaaggtcgcaacactgcactccagcctggatgacacagcaagaccaactccctcagggtaaaagccaaagtcctcccttcggcccacaaggcccactgtgacttgtcacctccccgccctcacccacttggtgactgcactccactccagccacatggcctcctcgctgttcctggagcgggctaggtgtggccctgcctcagggccttggcacaggctgtgcctgcttcctctagataactgtcttgctccctccccacttcactcaggtctcccccaaatgcatcccctccaagaggccactccctgcccagtcactctagccgaccttaactttgctgtctgttttctccaggtagtacctagatgccatctgtggccatttgtttacatgtgccctgtctgtctctcccaccagaatgtcagctcctcaagagcaggaacactgctgttttgctcctcctgtacccccagtgcccccaaagggcctggttcatagcaggtgctccaggaacatttgctggatgagagaacgctgcatagcgggcgggcatggtggagccggaccgcctgggtttgaatcctggctctgccccttccaagctgggtagctccaggcaagtgacttggcttctctgagccccaggtgcctcctctaggctggggagaataagggattcccatcccggagggctgccaggcaggaggaagggagtgaagacatcgccaggacacagaacaaggctgggcacacagtgagtgctgggaaatggtatctgactcttgtgatggtcctggtccctcagccaagtgcgaggacagcatgtcccccactcctaccctgtgggccgggagatgaagaggggcccagaagaggtgtttgggtctagggaatgtgctcacagtctccaatcatgagggcaacagagtcgtcacccacagccgcctctccggcccagccctttccctcctcaatgcgctcctcatcccttgaggattcaggatcaaggtcatagctcacccctgcctctggagaaacctaagaagggaggggctcactgccaccagctggccttcaccctgctggacatggcctgggacccccagctccagggctcagagctgtgcagaccctgacagttcaagctctcaccaactggtggccagcaggacaggaggagcaagctccagacctcccctctaaccaccagtgcttggctccccctgcccttagggctctgcaaaagctgttccctctgctcggctctcccctggctgactcccatgccgggagcaagagaatgagggagccaaggacactgcgcctgagacacaagacacgcagacccgggtttgaggtcgggctctgctggttccaactgtgctgcctagggcagcgacctggcctctctgggcctccatctccatattcccaccgctcccaactctccccacctcccccaggctgagcctccacttacttttcttccgctttggctttttggggacctgctcccaaggcttcctgcaacagaaagaggcagagagggtgaacgggggaccagcgctgggcctgtctgacccatgagtaacaacagtggctagagccactgctcattgtacactgaaactaaatctgaactttttgagatggagtctcactgtgttgcccaggctagagtgcagtggtgagatcttgactcattgcagcctttgcctcccaggttccagcgattctcctgcctcagcctctcaagtagctgggattacaggtgcacgccaccacacctggctaatttttgtatgtttagtagagacggagtttcaccatgttggccaggctggtctcgaactcctgacctcaggtgatccgcccacctcagcctcccaaagtgctggtattacaggcatgagccgccacgcctgccctgaacttttttttctttttgagacaatgtctgtctctgttgcctaggctggagtgcagtggtgcgatctcggttcactgcaacctccgcctcccaggttcaagtgattctcctgcctcagactcctgaatagctgggattacagactaattttgtatttttagtagagacggggtttcaccatgttggccatcctggtctcaagcttctgacctcaggtgatccgcccacctcggcctcccaaagtgttgggattacaggcgtgagccaccgtgcccagcctagaatctgaacttctatgtacctttccccaactccagaactgtgtcaccaggcccctcccttggactctctccccaattgccatcagccctgggagggggctctagcatcatccacctcaaggagcaggaaaaacaggcttggaggggtgaggccatctgccctgggtcccacagtcagggagcagagaagtaacaaagtgggtatgaaaagtttgtgtggaagcagaattccaagatggcccccacagttctgctgggacacatgccctgtgtgatcctcttcccctgagcggggcaggcctgtgagtaggactggatgtcaagccttggttaggtgactgtgagttaatcaaacgggaacatatcttgtagggcacagtggctcaagcctgtagtcccagctacttgagaggctgagagtggtcttggcccacagccagcaagacagtgggtactgtctgggtgtggtgtctcacacctgtaattctagcactttgggaggctgaggcaggaggactgcttgaagccaggggttcaagaccagcctgggcaacatagcaagatcccacctctatttatacaattaaaaaaaaaaaaaaaaaaggccaggctccgtggctcattcctgtaatctcagcacgttaggaggttaagacgggtgcatcgcttgaggccagaagttggagaccagcctgggaaacacagtgaaaccccatctccacaaaaaatacagaaattacccaggcggggtggcatgcacctgtagtcccagctactcaggaggttaaggtgggaggatcacctgagcctggggaggtcaaggctgcagtgagctatgatcacaccactgcactccaacctgggcaacagagtaaaaccgtgtctcaaaaacaaagaaacaaacaaaaacaaacaaaaaacgatcttcgtcatggtacagccctgtcacttaatcatcaataagcaaatggtacaatgatcgttatgattatcagtatcatcgtggagcctgggccccctggcctccctgctgtggcccagacctgctcttgccacaaacatcctgacagccagtctagtgtctcttatcagcaaaactgtccaccccgtctgactcctgcccagccctgtaacaattctcagtcccacacccgtctggttcccaggactgcaccttggggatcttccatctttcctgccccaggctctgcccctgcctctggctctgctactccaggtcccattccatgtgactctatcccttcccatggctccaccctcccctgcaaagcaccacactggctgtagagaccttcacccaacccaagacccaagtctggctctgtcacccaggttggagtggagtagcactatctcagttcactgcaacctctgcctcctgggttcaagcgattcttctgcctcagcctcctgagtagctgggattatagatgcctgccatcagcccagctaatttttctatttttagtagagacaggatttcgctatgttggccagactggtctcgaactcctgacctcaagtgatctgcctgcctcagcctcccaaagtgctgggattacaagtgtaagccaccatgccctgccccaaacccaagtcctgatgtccacagccacctccatccactcaccgctggaggctgggagtgtcacattgcagtggggacagtcttgggtatcagccagacccaagttcaagactcagctctgctctcaactgcctgtgtgacctcaagcaggtcttgtcccctctgagcctcagtctccgtctgtgaagtggaaatagtagtagtgcttctgacacagggtcaccatggggaccaaacaaggtcatatgtaacctggtgagcgccactttccaacccccacacagggctttctccctcaaactgccttccctctcctgtccacttctccaacttctgccacttctctgtgactcccagcagaggccactggcatcaaggaccacagctccggggctactcaggccctggcttggctgtttcccgccatttcctttcagtcttcagtcattcccaccagcatctaaatatgccatgatttctcccatcttgggttaaaatcattttgatacccaccttccccaccagccccttccccatatctttttttttttttttctttttgagacaggctctcgtggtgttgccccagctggagtgcagtggcgccatcacagctcactgaagcttcgacctccagggctcaaccgatcctcttgcctcagcctcctgagtagctgggaccacaggcatgcaccaccacacccggctaacttttgtactttttgtagagatcgagtttcgccatgttgcccaagctggtctcaaactcctgggctcaagagatccttctgcttcagcctcccaaagtgctgggattacaggtgtgagccactagcacccagcctccttcttcatttccccgttttgtcacagttgtctacactcgctgtctccatgtcctctcctccatctcactggaactcctccagtcagagctttgctccatcacgtcacacactctcccatcacagtcaccagtgacggcttcactcggcccaacagcactggacatggcagacacttcctttggcctcctgggtgctgccactgcccagtgctccactggcaccgggctgctgcttctccctcacctcccttaccaaggagagcaaccgccacactcaggcctgtgttttctgtctaaaagtatccctttagtaacttttttttttcttttgagatagagcctcgctctgttgcccaggctggagtgcggtggcacgatcttggctcactgcaaactctgcctcctgggttcaagtgattctcctgcctcagcctcctgcgtagctgggactataggcgtgtgccaccacgcccagctaatttttgtatttttagtagagacggggtttcaatatgctggccaggctggtctcgaactccttacttcgtgatttgctcaccttggcctcccaaagtgctgggattataggcgtgagccatcgcgcctggcctatttttattttactttttgagacagtcttgctctattgcccaggctggagtacagtggcgcgatctcggctcactgcaacctccacctcccgggttccagtgattctcctgcctcagcctcccaagcagctgcgactacaggcgtgcgccaccatgcccggctaatttttgcatttttagtagagacagggttttggcctattggtcaggctggtctcaaattcctgacctcaagagatccacctgccttggcctcccaaagtgctgggattacaggcgtgagctaccatgcctggtcttccttttttttattttaattgttgacaagagtcatgaacctccttggactcatcatcagctttaacaattgttaactcttggccaaccttgtatcacaatgtgtaccccatccattcttcaagccacacacatcctagagacagtttcttctaaaatacaaaccaggctgtgtgtgacttgtagtcccagctactctggaggctgaggtgggaggatctcttgagtccaggagttcaagaccagcctgggcaatatagcaagactgcatctcaaaaataaataaacaaataaataaggaaataaaaggccaggcccaggcccgggtatggtttcatctttacatttaaatctgcaaccccgccgggcgcagtggctcacacctgtaatcccagcactttgggaggccgaggcaggcagacctcttgaggtcaggagttcgagaccagcctagccaacatggcgaaaccccgtctctactaaaaatacaaaaattagccgggcatgggggtgcacgcctgtaatcccagctactcgggaggctgaggcaggagaatcgcttgaacgcgggaggcagaggttgcagtgagctgaggctgcgccaatgtactccagcctgggtaacagagcaagactccatctcaaaaaaaaaaaaggtggggggggcatcaggggaaataaaggcagaccataccacttctttctctgtacaaaatcttgcacttaagaaaaggctcccacctcactgggaggaaaaactggagtcctctccatggctctggatgaccttccctgtcaccaatctgtccttgtcttcccttctccccctcactcattgcagtccagccacacaagcctcttcagtgttcctggcacacaataggcagggtcctgcctcaggacctttgcctttgctattccctctgcctcaactcttccccagagatctgcatggctcctcctaggttccttcatgtctttactgaaatgctatcttctgaatgtgaccaccttaactccctatttaaacttccaactcacactcttcatttcacttttgttttttccgtagcccctatctctcatggacgatacaatttacttatgtttctggtctgcagtaaacaagccttttgccaggtatggtggctcatgactttaatcccagcacttcgggaggctgaggacggaggatcccttgagccgaggagttcgtgaccagcctgggcaacatggcgagacccccatctccatgaaaaattaaaaaattagccaggtgaggtggctcctctgtagtcccagctacttgggagactgaggcaggaggatcccttgagcctgggaggttgaggctgctgtgagctatgaacatgccactgtactctggcctgggtgacaaagtgagaccctgtctcaagaacaaacaaacagggctgggcacaatggcttacacctgtaatcccagcactttgagaggctgaggccggagaatcacttgagcctaggagtttgaaatcagcctgggcaacacagggaaacctctgtctctacaaaaaatacaaaaattagccaggtggagtgacgtgcacctgtggtcccaactactcaggaggcggaggtaagaggatcacttgaacccacgaggttgaggctgcagtaagccgtgatcatgccactgcattccactctgggcgagagagtgagaccctgtctcaaaaagaaaaacgagggccgggcgcggtggctcacgcctgtaatcccagcactttgggaggccgaggcgggtggatcacgaggtcaggagatcgaggccatcctggctaacagagtaaaaccctgtctctactaaaaatacaaaaaattagccgggcgtggtggcgggcggctgcagtcccagctacttgggaggctgaggcaggagaatggcgtgaacccgggaggcggagcttgcagtgaacggagatcgtgccactgcactccagcctgggcgacagagcaagactctgtctcaaaaaaaaagaaaagaaaagaaaaacgaacaaaaaaaccccccagacctttgaacaagccatcccctctgcccaccagaatgtccgctccatgaggcaggtatctttgcgctcccagcatttccagtcctgctcttgagcatataagccagcctgctgtcctgggaaaggggtgggtataacttagcaggatctgtttgattcttgactctcagaatctccccccagagaaacatgagaacatgtgtacctgaaaaccagggcagaacaaggatttccttgcggcactgcttgtgatacggaataaacgtcatcctcgtaaaagttaatacttagggaacccactacctgccaggcactcttctaagctctttgcctattttaactcaatcatcacatcaacatataaggcaggaagggaaaaactccatccacactgctccttctcaagactgagaatttacaaagacaggcctctctgccctccacctgccaagctaactaggggtttcctcttcatccgagtctccctgggctgagttgcttcacagaaataggtttaggggagtgcagtccaggttgtgaagggtcccccggatgtgttggatctagggttgtgggaatggggccatacggagtcccagatggggcaccagaacttcaagaagggcagggctgagtgccccagggtgtccagagtcccaggccaggtggggaactaagcgggggaggatgagaccggtgagggggcggggctgcccccccagggcctggttagttacaaggcctggaggtggggccagtcccaggattgggccgccagagttctagcgggcggggccaagcgctcagaaggcgggtcgaggggctgggtgcaccctaggattgggcagtcggaacgatgggaggcggggccacgagccaggcgcgtcccggccaggcagtacgagacccaggccgccggcccggctcctgggcggggtccgcaggtgccgggggctggccctagaagcggagggggcggggtaaagcccggcggggtctgggggcgtctcctccctccctccctcggggccaggccccctcacccgtggcggccgctccgctggccgcgctccagagagatgaggtaggcggcgagcttggcgtcgctccagccgctgcggcgccgcaggtccacccagggcccgtgcgcctcgcccaggtacacgcgccgcacgtcgtacttcttccgggactcgagccgtcgccgggcccggtccgactccgtgagtcgcggccggccccgcgcctttcggcccgctgcgccctcctcggctgctgcctccccgcccgcgcccgcctcagcctccgcctccgcctcgggctctagcgcccgctccgccatcccccccaccctggttaccagcctcccccgttgttaggagccagaccggaagtggcgcgcatcttcggcgccgccgagaaatttctcacggtctctcgctgccccagggcgccaaaaggagaccaagaatggaaactgcgcatgcgcacaaccaacagcgctcccgcccctttttatttgaattcggagaaccagaggcgcctgcagattctggaggggtctcgcctgcccatcgctggcagcccgagatcctggggaggggatgccatactgctagagatgagggaagagagccccaagcaggaaaacattgatttgctgtacactcaaagggcatctcatgccttcagtccaccgcctcctcgggccacagcccgtgccctcgcgccggctcagactagctctggccctgctgctgtcgctgcaggttgtcgtcttcttcctggtggtcctcgggcaggggcggctcctccagccctgcagaggatgtctggagctcccgggtggacccggcgaggcggaagaccacggggatctgggccagggttgggttggtctcctgcaggccctggatccacttagccatcgtcgcctggtcatgagcacccgccatgcacatggcgaagacagggccttcctccactgttggaagacatgcacccttaaggtttgcacagtgggggctgcagcggctaacccatgcctacacctttttgaggtattttacactcccttccacttcctttttttttttttttttttttttgagacggagtctcgctgtgtcacccaggctggagtgcagtggcgagatctcggctcactgcaacatccgcctcccaggttcaagtgattctcctgcctcggcctcccgaggagctgggattacaggtgcacagcaccacgccgggctaatttttaaatttttagtagagatggggtttcaccatgttggccaggctggtctcgaattcctgacctcaaatgatctacccgcctcagcctcccagagtgctgggattacaggcgtgagccactgtgcccggcttccttccactttcttgtgcctccaaacctttgcacaagctagccccgctgcctaggctgcccactccacacttcacccgggcgatgactcctggtttttctgtattctgccaggaaggcctcctgaccccccactcaaggcatgctcctctcctaagctccccaaagtgtaatttgcctgttcccttgctgactcgagggactaggtttgtcctggtgacacccagtagccagcacagagttgtaggagggagggaatgaacaagggccaacagggctgggtgacctcaggtctggagcccctggggcaaatgagtgtgtgcggccggaggacgagggtgtaagtggactgcgtctcagcctgggcctaccccttgaccccagaggccgcccctcatcctgggtggtgtttggaatgtttggaagtcctgcctgtccaggtttttgccttttttttttttttttttgacacagggtctatcatgtaggctggagtgcagtggctctataatagttcactgcaacctcaactcctgggctcaagtgatcctcccacctcagcctgtaggagggctgggattacgagcacacatgtgagccaccgcacctggcccagtttttaccttcattgatgtcaaactcgtagttgtcccagccactcctcacatactccaggtccagctgcatcgggtagtagaggttccactcctccggcgtctcttccacttcctactccaaggtggggagtgcaggcggggtcagaggccagggctctctcggtctccctcctccagcctctcccatgcaccctcagggtagtgccagcccactccccagccccaacacatgctttgctttaagccctcaccctctcctccgggggcagcaagtcagctctgaggatgtggtaatacacacacttgttgcggagccacagggagaaggggccctcaacaaagacaggccgggctggattgtggcgggccagggcggcctgctgatcgggactctggattcctggtgtggagacatacatgccctgtgccctgcaagggactcggcccagaggcccagggagcccagcctaggcccagcgagaacctggcagggcctgggtaaggttagagacttggctgcccccatgctctcggacttacctacgatgtggggctgggggggatctgctgcacctgttgagtctttgggcaaaggaacctgcaagggagagtagggatataatcttgtaacccccaatcccctacagaggaactggggacagagaaacagaaagggggataccagggaattcaggacacctctcctggatctggtacacggccctccaacctgtcccctcctccctctgtcccatttggcaataaccaccaatctttaggatgctcaccctgagggaactaccctagaaccagcccacctttgtcaaaatcctggctctgtcacaagctgtgtgaccttggccaagtcactgtacctgtgtgcctcagtttctccagatgcacaatagggatgataacagcacttaattccgattttttttttttttttagggatgggggtctccctctctgtcatccatgctggagaatggtggcatgatcatagctcactgtagccttgaactcctgggctcaagtgatcttcctacctcagtctcccaagtagctgggtctacaggtgcacaccactatgcctggctaattttatttttttaatttttgaaatggagttttgctcattacccaggctggagtgcaatggcatgatctcggctcactatagcctccgcctcctgggttcaagcgattctcctgcgtcggcctcccaagtagctgggactacaggcgcctgccaccatgcccggctaattttttgtatttttagtagagatagggttttgctatgttggcctggctggtctcaaattcctggcctcaggtgatccgcctgccttggcctcccaaagcactaggattatgggcatgaacctaactttgggtggttgtaaaatatgtagcacagtccctggcaaataataagtgctcagtgcttgtgaattaaaaaaagaaaaataacttcacatatacagaatatcccaggaaggagacactagaagcaaatgatagctttcacctctgtggaggacagggtgggaaggaataccttttttatcttttaaaattttataccttgaacataattcaaaaacactagacaattttttttttttttttttgggacagagtttcgctcttgttgcctaggctggagtgcaatggggcttgatctcagctcaccgcaacctccacctcctgggttcaagtgattctgctgcctcagcctcccgagtagctgggattacaggcatgcaccaccacgtctggctaatgtctgtatttttagtagagacagggtttctccatgttggtcaggctggtctcaaactcccaacctcaggtgatccacctgcctcagcctcccaaagcattgggattacaggcataagccactgcgccccgctgacaaagtttttttttttttaacaaaatgcacttgcttttgaaacaaaacagtggacagctattagaacatatatcattcatcctttcaagttaaaaaaaattgagatgagcaggccgggcgcagtggctcatgcctgtaatcccagcactttgggaggccgagggtggtggatcacttgaggccaggagttcaagaccagcctggccaacatggtgaaaccccgtctctactagaaatacaaaaattagccaggcgtggtggcacacgcctgtagtccctgctacatgggaggctgaggcacaagaattgcttgaacctgggaggaggaggttgtagtgagccgagattgtgccactgcactccagcatgggcgacagagcaaggctctgtctcaaaaaaacaacaaaaaaatttgagatggatcagtgacttctagttgtattaaatgaaatttgtaaaaggcaaggtacatgtatataatgccctgctactaaagaaacttttttttttttgagatggagtttcgctcttgttgcccaggctggagtgcaatggcgcgatctcggctcactgcaacctccacctcctgggttcaagtgattctcctgcctcaccctcgcaagtagctaggattacaggcatgcaccaccatgcctggataattctttttgtatttttagtagagacgaggtttctccatgttggtcaggctggtctcgaactcccaacctctggtgatctgcctgcctcggccttccaaagtgctgggattacaggcgtaagccaccatgcctggctaaagaacttcttttttttaaacagacaggatcttgctctgtcacccagtctggtgtgcagtggtatgatcacggctcactacagacttgacttcctgagttcaagccaccctcctgcctcagcctcctgagtagctggggctacaggtgtgcaccaccactcccagctaattttcgtatttttttggtagagatggggtcttgccatgttgcccaggctggtctcgaactcctgggctcaagcaatccatctgcctcagcctcccaaagtgctgggattacaggcatgagccactgtgcctggctgtattttactccataagacgggggagaaggatatttaaatacaaaggatacagatgccaaaaaaaaaaagagagagagagagagagatctgcttgcaaatgtatagaacctctctggaaggagacatggaaatagtcacctctggggagggagacgggcggcgtcaggggcagcgcacggggcctgggtagaagcagaggactcgtcactgtgtgcttttacatgctgtttggctttttagtgcattgctttgcaaaatgaagaaatgaactaaaaacaaccctcccccccacattctgctgctggtctcaagccatctctcacctggacccacgaccctggtcccctagcccctctccccatccaacagcatccacacggctgccaggagacacgtttccaattgcagattcttccagaaacatgattccaacccgattccttcttcttaaatctctgcccccccacccccggcatagctctccccaccaaccaagaggtttgagatcaagctctttaatcaggtgcccccactcactgcaccgcatttcctggtacacactgctccctctgcccagcgtcctctgctctccttacctcccccaggaagccccacctgcccactcggctcccacagcaccccgggcttctccatctcagaaccactggctcttaaggaaactgttatctgtccaggaccacatgacaagtgctgtgaggggctctctttggatcccttgtgtgatctggcatgagtgggggctcccaggacactgagttgagggtgttactccactcagtcattcaacaaaccactgccaagtgtcagctttgcaccaaatcctgtgctcagccttgggagacaggagggagactgagtcatggtgaatgaggaaccaagccaagcacggtgaaggggtggtgccttggccagggaggtcaggaagggcatcctgattaggaacagtggagctgagaccggaataacatgaagtccatggggaacagtgttcctggcagaaggaacagagaacgcaaagccctgtggtgagaattggcacagaaaataaggaagatgcctagaatgtagcaagtgttgggagaaggatgggagggtgctatggtctgaatgtttatggccccctgaaattcatatgttgcaatctatctacaatgcaataggattaagaggtcaggcctttgagaggagaggcacttagatcataagggctctgccttcatgaatgagattagtccccttataaaaaaggtcttggccgggcacagtggctcacgcgtgtaatcccagcactttgggaggccgaggtgggcagatcatgaggtcaggagatcaagaccagcctggccaacatggtaaaaccccgtttctactaaaaatacaaaaattagctgggcctggtggtgcatgcctgtaatcccagctacttgggaggctgaggcaggagaatcgcttgaacccgggagtcagagttgcagtgagctgagatggcgccacagcactccagcctggcgacagagcgagactccatctcaaaaaaaaaacaaacaaacaaaggtctgagggggccaggcatggtggctcatgcttgcaatcccagtactttgggaggctaaggtgggtggatcgcttgagctcacgagtttgagaccagcctgggcaacatggtggaaccccatttctacaagaaatacaaaaattagccgggcgtggtggtgtacgactgtagtcccagctacttgggaggctgaggtgaaaggatggcttcagcctgggaggtggaatttgccgtgagccaagatagtgctactgcgctccagcctgggcaacagagccagaccttgtctcaaaaaaaatatgaagaggtctgaggggcttgtttgccccttatattatgtgaggacacagcaaggtgtcatctttgaagcagagagcaaaccctcaccagacctagatctggtggcaccttgatcttggacttcccagcctctagaactgtgagcaataaatttttgttgttcatcaatgacccaagctaagagattttgttagagcagcctgaacggactgaagcagaggtcactcaagctgtgctagcagtaaggaccatgggaacctaccaggggactcagccagagaatcagaactcaattcacggccaggcacagtgcctcatgcctgtaatcccagcactttgggaggccgaggcaggaggattgcttgagcccaggagttcaaggccagcctgggcaatatagtgagaccctgtctctgaaaaaaaaaaacagtttttttaattagccaggcatagtggtgtgtgactggagtcccagctactcaggaggctgaggtggaaagatcgcttgagcctgggaggcagaggctgcagtgagccgagatagtgccaccacactccagcctgggcaacagagcaagaccctgtctcaaaaaagaacttgattcaccacaatcactagagtgagagaaggggagcccaggggaggaatggcgggagcctggcctggggtggcagctgacgctgtagacaagggcggatacctggtagatggtgaccctggcactaaggtcaggctccatgtgccgcaggccaaacatggccagctccacagggtcctggggcaggtcccggggcactgggaaggggttgacgttcatgaatcgagggaaccacagcttcaggcgcaccaacttgagcatggggtagcttttgcgtccaaagatctgaatcagcaggaactccgtctccttgttgggcatcacacctgtgctgggcagatgcaggcagaacctcagagatggagggggaggagggaagggaagaggagaaaagaaaacagtgaagtgagggaattgatcacagacagggagaaaagaatcagagagaattagaaagaaaaaggctcatgcctgtaatcccagcacattgggaggccaaggggagaggatcacttgagtccaggagtttgagagcagcctgggcaacatagtgagaccccatttctaaaagaaagagagaaagagaggaaggaagggagggagagagaggcagggaggagaggagaagagaggagagtggggggaggagagggagggaggggggaggggaggggaggtcagagggaggcaagaaagagagatgagtgatgaaaagagggattcggagagggagaagagcgagagagacagagacggagccatggaggaaggaggggctgagactcaggagaggtgctgccagctatcagtgtagcccactccccaccctgcgccagcctcctggcctcaccgtggttctccatctgctccaggacagcaatcccacactcctgctgccgagggtagtggacgaagatgcgctggatgatgttgcgaggccggaagacctccttggggaagatgttgagcagctggttgtacacagccaggtcccgctcgacaccatactcccgcatcttgcgcagggccaggtagatgaagtcaatgtggccccgcttacgcacgctgtgctccgcaaatttctgcaccgtctgcaggaagctcgccttgtcccgttccccaccaggcgcctgcccaaacaggtcctcaaagggcaccagagccttggtgggcctctgccggggttccggtgggctgggaaccagggactgttcagagctatgggcagctgcgctgcagtggaggccccgagggagccggcgagggacctggggagggaggagaactgctggaatctggcacctctcagtgtctatggggggccgccaggctggctctttcctcagagaggtcccagtggcctccctgaggactcggaggtatggaactgtggttacaaacccaagattcgaggccattacaaagtgcgataaaacacaatgctggcacagtagggaggaaacaggcactgttagccatggctacggggagctggtaaaaactgccacggaggcaacttggtaatattcacagtgatgacacacacatgccggtttttttttgggtttttttttttggtttttttttgagacggggtctggctctgtggcctaggctggaatgtagtggtgctactgtggcttactgcagctttcaactcctgggctcaagcaattctcctcctcaccctgtccagcagctggaactaccggtgtacaccaccacacctggctaatttttaaattttcagcagagacgggagtcgcactattttgcccaggttggtcttgaacgcctggcttcaagtgatcatcccgtctccacctcccaaagtgttgggattacagacatgagccactgtgcctggtggccctttttgcttgtaattttttttttttttttttagacagagtctcattctgtcacccatgctgcagcgcagtggcgtgacctcagcccactgcaacctctgcctcccatgttcaagcgattctcatgcctcagcctcccaagtaagctggactacagacgtgctccaccacgccctgctaatttttgtatttttagtaaagatggggtttcatcatgttggccaggctggtctcaaactccaggcctcaagtgatccacctgcctcagcctccccaagtctttttttttttttttttgagacagagtctcgctttgtcacccaggctggagtgcagtggcgcgatctcggctcattgcaagctccacctcccgggttcacgccattctcctgcctcagcctcctgagtagctgggactacaggcgcctgccaccacgcccagctaattttttggatttttagtagagacggggtttcactgtgttagtcaggatggtctcgatctcctgacctcgtgatccgcccgccttggcctcccaagtgctgggattacaggcatgagccaccgcgcccggcgtagccaccttaagtcttgagattacaggcatgagccactgtacccagccccttctttctttttctttttttcttgagacagagtttcactcgtcgcccaggctggaatgcaatggtgtcatctcagctcactgcaacctctgccttgtgggttcaagcgattctcctgcctcagcctcccaagtagctaggattacaggcgcctgccaccatgcccagctaatttttatgttttgtttgtttgtttttcctgagatggagtctcgctctgttgccaggctggagtgcagtcacacgatctcagctcactataacctctgactccctggttcaagcaattcttctgcctcagcctcccaagtagctgggattacaggcacatgccaccatgcccagttaacttttgtatttttagtagagacagggtttcaccatgttggccaggctggtcttgaactcctgaccttgtgatccgcccacctcggcctcccaaagtgctgggattacagatgtgagccaccatgcccggcctaatttttgtgtttttagtagagacggggtttcaccatgttggccaggatggtctcgaattcctgacctaaggtgatccacccaccgtggcctcccaaagtgctgggaccctttaagagatggagtctagctatgttgcccaggcgggagtgcagtggctattcacaggcatgagccaactggtcagcacaggagttttgacctgctgtttccaacctgggtcagttcacacttccttaggcaacctggtggtcccccaagtcccaggaggtcacaatattaagcaaaacttagtgcaggacactccatcagcatagtgcacaacagcccagaactcctgggctcaagtgatcctcccacctcagcctccagagtagccaaattctggttctagatgacacagtaacaaatttcttattttaaattgaatttttaaattagaagggttacatataaggcatcttaaaaatatacagctagttatcaaggttgtactgtgctttgattgcaccaccgcattgcagcctgggcaacatagtgagactccatctctctatgaaaaaataaaaaaataagcggggcgtggtggtgtatacctgtagtcccagctactcaggaggctgaagcaggaggactgcttaagcccaggaatcccaggctgcagtgagctatgattgtgtcactgcactccaacctgaacgagagagtaaaaccttatctctaaaaaataaatgaatgtgtgtgtgtttatctacacacacacacacacacacacaaaacgctaacaagtaagagccaatattagtccaggctcggtggctcacacctgtaatcctagcactttgggaggctgaggcgggcagatcacctgaggtcaggagtttgagaccagcctgggcaacctgctgaaacctcatgtctacaaaaaaatacaaaaattagccaggcatggtggtgaatgtatgtagtcccagctactcaggaggctgaagtaggcagatcaattgagactggcgggtcgaggttgcagtgagccaagatcacgccactacactccagcatgggcaacagagcgagaccctatctcaaaagaaagagacaatatttaccaaatattcttccactgtagacacagttgagcactttacaaatgtgaggccctaggtggggggtactcttactgcactcattttacagatgagaaaaaccaaggctcaggaagatgaagtgggatgcacagtgttacacagctgcaaagcatcagagctgagaatggagtcagtgccctcagtccccctactctgcggtccccacagccatcccatatcgttctttgataaggcaatgttaaaaaaaaaaaaaggcattcatttacagtaaaatttcaggttgggcgcagtggctcgtgcctgtaatcccagcacttttgagaggcgggtggatcacttgaggtcaggagtttgagaccagcctggccaacatggtgaaaccccatctctaccaaaaatgcaaaaattagccaggtgtggtgccgcacacctgtaatcccagctactcaggaggctgaggcaggaaaatcacttgaacccgggaggcagaggttgcaatgagctgagatcacgccactgcactccagcctgggtgacagagggagactccatctcaaaaacaaaaaacaactgaaatttcagtcaattaataatataggtggtgtagtattgtaccactttggggtaaaaatcagaaaggaagctctaaaatgcctaacgagggggaaacactgcaaaggaggtaatgtaaatgaaatgcatagtgcggggccgggcacagagtaagtgctcaatatgggaactattaatattcccaccatcatcgttattgctatctatggctgtcaatctgctttcgccatctggtcactatgggtataggaaagaaattcagttttctgccccatcttcacaagtagatgcaggaggagctgctcacagtcaccacacaaatccaccgagctcatacatccttattttcaaagtcaatcccctcacccacgtaggcactagcatctcttaaattagggtccaggcacagtggctcacacttgtaatcctagcactttgggaggccaaagtggaaggactgagggcccagaggttcaagaccagtctgggcaacacaacaagaccatatacttaaaaaaaaaaaaaattagcggccgggtgcggtggcttatgcctgtaatcccagcactctgggaggccgaggcgggtgaatcacctgaggtcaggagtttgagaccagcctcgccaacatggcaaaaccgcgtctctactaaaattacaaaaattagctgggcgtggtgatgtgcacttgtaatcacagctactcggcaggctgaggcaggagaatcacttgaacccaggaggcagaggttgcagtgagccaagaccacgccactgcactccagctttggcgacaagagcaaaattccatctaaaaaaaaaaaaattagctgggcatggtggctcaaatcagtgatcccagctactcagggggctgaggtgggaggctcatttgagcccaggagtttgaggctgcagtgagccctgattccaccactgtactccagcctgggtgatagagcaagaccttgtttcaaaaaaataaataaattatggacttttggccaggcgcggtggctcacgcctgtaatcccagcactttgggaggctgacgcaggtggatcacttgagcccagagttcaagaccagcctgcccaacatggtgaaaccccgtctctacaaaaaaaatacaaaaactagccgggtgtggtagtatgtgcctgtagtcctgggtacttgggaggatgaggcgggaggattgcttgaacctgggaggtcaagactacagtgagctgtaatcacactactgcactccagccttggtgacagagacactgtctcaaaaaacaaacacataaacatacatacatacataaactaaggacttttaatgggacctcggcactgataggccagcccagactcaccagaactggcttcacagagtggattctgaaggagttgggagcaaatcccaagcttacctccctctacccaaaagactgcctggctggtgcttacctgagagatggaggttcctgtgagggcggccccgcaggtgcctccccaggccctacagaggcctcgggccagtagggtggcctggacccagctcatgcctctgcttgtcagacaatcacctggcccaaaagaagattcagcattagcctggcaccttacagatgctaacagacgcaagggccccgcagggtcgagggcacactccagattatgtggctcactcaccagccccaatgtttaccttacccaagaaacaggctgatgactcaaagactttgttcttgggacagcaccctaatcctgctgccccaggggcgtgatcatagctcaatgcagcctccaacttctgggcccaagtgatcctccagccccagagcgtcgagaagctgggactacagacgcgtgccaccatgcccagctaatttgaaaatagtttgcagagacccagggtcttgctgtgttgcccaggctggtctcgaactgttggcttcaagtgatcctcccatctctgtctccaaaagtgctgggatcatgggtgtgagccagcactcctagccactacaatctaattttacaaaatctgtgtcactccaacaagaatccctgtacctggccaggcgcggtggctcacgcctgtaatcacaacattctgggaggctgaggcgggcggatcactcgaagttgggagttcgagaccagcctgaccaacatggagaaaccccatcgctactaaaaatacaaaaaattagccgagcatggtggcgcacgcctgtaattccagctactgggaaggctgacgtaggagaattgcttgaacccaggaggcagaggttgcagtgagccaagatgatgccattacacctcagcctggggaacaacagcaaaactccatctccagaaaaaaaaaaaaagaagaaaaaaaaaaaagaaagaaaccctgtacccattagcactcaatttcccttcactcccaaccccaagaaaccactcatccactgtctctatagatctccctatgccggccatttcatacaaatggaatctggaatcacaagtgctcctttatgattggtttccttcacttgacatgttttttttcttttttctttttttctgagatgcagtctcgctctgtcacccaggctgaagtgcaatagtgccatctcggctcactgcaaccttcgcctcccggattcaagcgattcccatgcctcagcatcccgagtagctgggattacaggtacatgccaccacgcccggctaatttttgtatttttagtagagatggggttttatcacgttggccaggctggtctcgaactcctgacctcaagtgatccgccagcctcagcctccccaagtgctgggattacaggcgtgagccaccgcacctggcccactgacgtgttttcaaggttcatgcatagatttttttttaatttttattatttttatttttagacaggatcttgctttgtttcccaggctggagtgcagtggcacaatctcagctcactgcaacctctgctttccgggctcacgattctcctgcctcagcctcctgagtagctgggactataggtgtgtgccactgcatccagctaatttatagatttttttgtagagatggggtttcgccatgttgccaagctggtctcaaactccttaccttgtgatccgtccgcctcagcctcccgaagtgctgggattatagtcgtgagccaccgcacccgggcttttttttttttgagatggagtttcattcttgttgcccaggctggattgcaatggcatgatcttggctcactgcaacctctgcctcccgggttcaagtgattctcctgcctcagcctcccaagtagctgggattacaggcacccgccaccatacccagctaatttttgtatttttagtagagatagggtttcaccatgttggccaggctggtcttgaactcctgacatcaagtgatccacccaccttggcctcccaaattgctaggattacaatcatgcccggccaattccactgtttttggaatggaatataaccaggttttgtatggctataaccatattttatttatgcattcatcaattgatggacatttggggttgtttgccaaatgtttttgactgttataactactactgccatgaacattcgtgtagaagttttatgtgaacacatgtttatacttctcttgggtatatacttaggagtcaaactgctgagacatatggtaactacatgtttaacatttttaggaactgccagactgtttttggggatgactgcaccatttcacattcccatcggcaacgtacagttgacccttcatcaacaaaggcttgaacagcataagtccatttatacgtggattttttttttttttttcagtaaaagttatggctgtacgtggtggctaacgcctgtaatcacagcacttcgggaggtcgaagcaggcagatcacctgaggccaggagttcgagagcagcctggccaacatgggagagaccctatctctactaaaaaaacaaaaaaacaaaaattagccaggctgggggcacactcctgcagtccccagctactcaggaggcggaggcaggagaatcacttgaacccaggaggcagaagctgcagtgagccaagatcgtgccactgcactccagcctgggcgaaagaggaagactctgtctgaaaaataagaataagaccaggtgtggtggctcacgcctgtaatcccagcactttgggaggccaggcaggataatcacttgaggtcaagagttcaagaccaaccaaccaacgtggcaaaaccccatctctactaaaaatacaaaaattagccaggctccttttgccggtggcggcaagcatggagaggatgccatgaaggcctcgggcacactacaagagtacaaggtggtgggttgctgcctgctcactcccaaatgccacacaccacccctctaccacatgcgaatctttgcacctgatcatgtcgttgccaagtcccacttctggtactttgtatctcagctaaagaagatgaagaagtcttcggggagactgtcaactgtgggcaggcattcgagaagtaccgcctgcgggtgaagaacttcggcatctggctgcgctacaaactcccagagcagcacccacaacatgtaccaggaatattgggacctgaccaccacgggcgctgtcacccagtgctaccgagacatgggcgcccggtaccccacctggacccattccatccagatcatgaagatggaggagatagcagccagcaagtcccaccggctggccgtcaagcagttccaagactccaagatcaagttcccgctgccccaccaggtcctgcgccatcagcacaagccacgcttcaccaccaaaaggcccaacaccttcttctaggggtagggccctcacccaggtgtgccccacgtaaactcaggaacgccccggtaaaaaaaaaaaaaattagccagtcatggtggtacatgcctgtaatcccagctactcaggaggctgaggtgggagaattgcttgcacctgggaggcaatgttacagtaagctgagatcgcgccactgcactccagcctgggtgaccgagtgagactctgtctcaaaaaaattaattaattaaatttaattaaataaaagttacaactttaaacactgaggggctagtaaaaagaaaaaaggtcgggcacggtggctcacgcctgtaatcccagcactttgggagggtgaggcgggtggatcacgaggtcaggagatcgagaccatcctggttaacacggtgaaaccccatctctactaaaaatacaaaaaaaatagccaggcgtggtggcaggcacctgtagtcccagctactcaggaggctgaggcaggagaatggtgtgaacccgggaggcggagcttgcagtgagctgagatcccaccactgcactccagcctgggtgacagagtgaaagaaaaaaaagttacagctgaatgtgcctgcctctccatctacctcctccaccacctcttctgcctctgccacccctaagacagcaggaccaacccctcctcttcctcctcctcctcagcttactcaatgtgaagacgatgagaatgaagacctttatgatgatccacttccacctaatgaatagtaaattcaatgtgttttcctgattttcttaataacattttcttttcttcagcttattgtaagattatagtattatatatatatataacattaaaaaatatgttaatcaccctttccctgccactgccgagttgcgcggaggcggaggcttgggtatgttcaagattcagcttcacccataacccactgccatggccgagggaggcattgctgctggaggtgtaatggatgttaatactgctttacaagaggtgctgaagaccgccctcatccacgatggcctagcacgtggaatctgtgaagctgccaaagccttagacaagcgccaagcccatctttgtgtgcttgatccaactgtgataagcctatgtatgtcaagctggtggagtccctttgtgctgagcaccaaatcaacttaattaaggttgatgacaacaagaaactaggggaatgggtagcgctctgtaaaattgagagaagggaaaccctgtaaagtggttggttgcagttgtgtagtagttaaggactatggcaaggagtctcaggccaaggatgtcatccaagagtacttcaaatgcaagaaatgaagacataaatctttggctcacataaaaaaataagttaattgactgttatgtaatcactgagacctctggacaacagtgggctattagtagttaagattttttgttttgagacaggatctcactctgttgcccaggctggagtacagtggtatgatcatggctcactgcagacttgacctcccaactcaagcaatcctcccaccactgcctcctgagtagctgggattacaggtgtgcgccaccacactcaactaatttttacaatttttatagaggctgggtttccctctattttccaggctgatctcaaactcctgggctcaagcaatcctcccacctcggcctcccaaagtgctggaattacagaggtgagccactgcacctggctggattttgggggtgtcaaaagtagcctggcagggtggctcacgcctgtaatcccagcactttgggaggccgaggtgggcagatcacgaggtcaagagatcgagactatcctggccaacattgtgaaaccccatctctactaaaagtataaaaattagctgggcgtggtggcaggcgcctgtagtcccagttactcgggaggctgaggcaggagaatcgcttgaacccaggaggtggagtttacagtcagccgagattgcgccacactgcactccagtctggatgacacagcaaggctccgtctcaaaaataaataaataaatagagcaccccactgaaggctgggcacagcggctcatgcttcttatccactttgggaagtcagagtgggaggatcacttgagcccgggagatcaagaacagcaaaaagaaaaaaaaaaaagaaagaaaaaaaataccagctgggtgtggtggcactcatttgtagtcccagctactcaggaggctgaggtgggacgatcacttgagcccagcagttcaaggttatatgagctatgattgtgctaccacactctggcttgggtgacagagtgagaccctatctcaaaaataaaaaaataaaaaataaaaagcactctggccaggcgcagtggctcatgcctgtaatcccagcaatttgggaagccaaggcgggtggatcacaaggtcaggagttcaagaccagcttggccaagatggtgaaaccccgtctctactaaaaatacaaaaattagcgggacagggtggcgggcgcctataatcccagctactagggaggctgaggcaggagaatcacttggacctgggagacagaggttgcagtgagccgagattgcaccactgcactccagcctgggcaacagagtgcaacttcatctcaaaaaaaataaataaataaaaataaacataaaaagcactgcaatgactttcatatgcacctaggattaagaccttaatttaaattttcagggccaggctcggtggctcatgcctgtaatcctagcactttgggaggccatggtgggaggactggttgagcccaggagtccaataccagccctgacaacatagccagacactgtctctataaaaaaatttaaaaattaaccaggcatggtagtatacacctgtctgtgttctcattccttgggaggctgaggtgggaggatcacatgagcctgggaggtccaagctacagtaaaccaagttcatgccacacactccagcctgagcaacacagcaagaccctgactcaaaacaaaaaaacaaaaacaaaaacaaaaaaactacagctacttaaagtgtgttctagggactggcagtgtcagcaacatttggaagtttattagaatagcaaaatttggccgggcatggtgactcacgtgtgtaatcccagcacgttgggaggtccaggccagctgatcacctgaggtcgggagttcgagaccagcctgaccaacatggagaaaccctgtctctactaacaaaaaaaaaaaaaaaaaaatacaaaattagccgggtgtggtgtatgcttgtaattccagctacttgggaggctgaggcaggagaattgcttgaacctgggaggcagagcttgtagtgagccaagagcacaccattgcactccagcctgggcaacaagagcgaaactccatctcaaaaaaaaagcaaaatctcggccctatcccagacctactgaactggaatctgcatttttttttttcccaggcggagtcttgctctgtcgcccaggctggagtgcagtggtgcaatcttggctcactgcaacctccgtatcctgggttcaagcaattatcctgcctcagcctcccgagtagctgggattacaggcacatgccaccatgcctggctaatttttgcgttcttagtacagacagggtttcaccatcttgtccagactggtcttgaactcctgaccttgtgatccacctgccttggcctcccaaagtgctgggattacaggcatgagccactgcgccaggcccaaatctgcattttagcgagtccctggtatctcctgtgagcattaaagtttgagaagtggtgatctgtgtgctgatggctccccaatgttcacctcaatccctgggccccagcctttatacctaactgccactttggcatatacccagccatctcaaacataatttgctccaaactgatatccttgcttaaacttgatcctctccatcctatccaatcgcaccactactactggccattcaggctacaaacctaggagacatttctgagtccactatgtccctcactctcctattcaatccatcaactagtctaggtgactacttccaaatccatcccaaatgcatctctttctatctgaagccaccacctcaatctatgacttggatacctatcaagcctcccacttttgcccttcctgcctccagtcagttctccccactatggccagagggagctttttttttttttttttggagacagagtctcactctgttccccaggctggagtgcaatggcgcatctcggctcactgcaacctccgcctccccagttcaagttggttctcatgcctcagcctcccgagtagctgggactacaggtgtgtgccaccacacccagctaattttttgtattttagtagagatggggtttcatcatgttgctcagggtggtctcgaactcctgagttcaagcaatccacccatcttggcctcccaaagtgctaggattacaggtgtgagccaccacacccagccagagggagcttttaaactaaaattaggccaggcgctgtggctcacgcctgtaatcccagcactttgggaggctgaagcaggtggatcacaaggtcagttcaagaccagcctggccgagatggtgaaagcccgtctgtactaaaaatacaaaaattagccaggtgtggtggcaggcacctgtaatcccagctattcgggagcctgaggcaggagaatcacttgaacctgggaggtggaggttgcaatgagccaagattgtgccactgcaccccagtctgggcgacagagcgagattccatcgctaaataaataaataaatcaactaaaattagtgatttctgcctaaaatcgctaacggcatatcacacttaaaatcagagactgggcacactggctcatgcctgtaatcccaacactttgggagaccaaggtaggaggatcacttgagcccagggattcaagaccagcctgggcaacatagagagaccccatctctacaaaaaaattaagaattatccaggcatggtggtgaatgcctgtcatctcaggtactcaggagactgaggctggaggatcctttaaggtcagtagttagaggttgcagtgaaccatgactgcacttgtgaatagccactgcactctagcctgggcaacatactgagatcctgtctctaaaaataaataaatagccagggagcagtggctcatgcctataatcctagtgctttggaagtccaagtggggaggatcgcttgagcccaggagttcaagaccagcctggacaacatagcaggacacgatctttacaaaaattattttaaaaaattagctggacctggtggtgtgcacctgtagttccagctactgggaaagctgaggcaggagaatcacttgagccatggagtttgaggctgcagtgagctatggagtgcactgcaccactgcactccaggcttgacgaacaagtgagatcctgtctctaaaaaataaaaataaataaataaaatcagatagggtctacccctctaaactcaactcctaccactggcagcttcagctacactgtttctgaaagaaactaagtttatcccatctcagaacctttgtacttgcttttctctctgtctagagctttcttcctccagatctgcccacagctgtctctggtcatttcaatgaaaggtcttctttgaccatctcccattccccacattctaaaagccctcatcaccctattaatttttgtttcggagacagggtcctgctctgttgcccaggctggggtgcagtggcacaatcacggctcactacagcctcaacctcctgggctcaagcaatcctcccacctcagcttcccgagtagctaggactacaggcgtgcaccactacgcccagataattttttgtagagaacagggtcttgctatgttgccaaggctggtctcgaaactcctgggctcaagcgaaattcccgacaccattaacgcatttttagtaacttatcagtatctgaaatcacctgtttcgtttatttctaatttgttcaaagtctggttcccccaggagatgagagatttttatctatcttcctcattgctgtgtctccagcaccaaggacagtgcctggtatatgacagatgcctaacgagtaacaactgaacggaaacaagcctcaatttcaaaaaaacacctataaatctgaaccccgaggtatggtgtacgtacaacagctttgaaaccggctgccaggattctgggtctcttgggggaaaaaggcagacgcggattccaaatcctgcccggttgccgacttgcggcgtgacctctcgcgaggtcatctgcaaaatgggagactgggggcgtgaggcggctggcacaagacaggcggcctttcccagcgcgtccccgcccccactacgaaaggtcatggcgccctggccctgcagctgggtccctccagggctgccctctcgcgctgccgggtcctgaagggcccgcctgcagcccagcagttcgcgttcgcctacccgcgcgcgacctacctactcacgcggccagccgcggactccaggccagctctgtcttgttgctgggcgctgccatattggcccagagagcgtccgggtcagggagctccagggaggtagcaaatcaagaaagctggtgtaataggtcccgcccacaacgcgaggtgggccaataggaaggcggaaggatctgggacccgcctcataacgagccaggcccagcctctaatgaggcaagacgcactccagacctgggaaccttgaaatggcccgggaggctggacttgggagtcatagtctatgaatccagtcgcaggccccagcggctgaaatgagaaaatgaattaaaaaaaaacaaaaagtgaaagggggccggtacggtggctcatgcctgtaatcccagcactttgggaggccagaagttcgagaccagcctgggcaacatagcgagacccccttatctacaaaaaatttaaaaattaactgggcatgatggcgcatgctcatagtcccagctattcgggaggctgaaacgggaggatcgcttgagccctggaggtcgaggctacagcgagccatgattgcacccctgcactccagcctgggcaacagagtgagaccctgtttctaaaaatagtaataataaataaatagggcagggcgcggtggctcacgcctgtaatcccaacactttgggaggccgaggcctgcggatcacctgaggtcaggagttcgagaccagcctggccaacatgatgaaaccccgtctctactaaaaatacaaagttagcagggcatggtggtgggtgcctgtaatcccagcttctcgggaggttgaggcaggagaatcgcttgaacccgggagacggaggttgcagtgagccaggataacaccactgcactccagcctcagcaacagagcgagactctgtctcaaaaaataaataaataaataaaaattagtggggcgtggtggcgtgctcctgtgatcccagctactcgggaggctgaggcacgagaattgcttgaacccaggaggtggaggttgcagcgagccgatatagcaccactgcactccagcctgggcgacagagtgagactccgtctcagtaaataaataaataggaaggcctcagtgaggtgtcctttgagtaaaggccggaggaagtgagtgagccatctggatatctggggaacgcttttggcactgggaacaacagcaaagactctgtgtggtcggagtggagtctttggaggaaatgggataaaacgaggtgagattgagtaatgggggctcctggtctcccccagaaagcaccagatttaggctgttaataactaaggtggataagcacataaaatgggctattggcaataacagtgtcccccgggaaggaaggctatctgccctcataagcccatttctgcagtccctcagcctctgtggcgcagtgagctggcatggagactaggatgcaagaacctacccttaggatgcctcaaggactctgcgcagccgcaggacatccacctcatcagaactcttgtgattgggcaatctgagaaaacctgtagccaatcagctgcttggctggagcactcctctctggcaagttgacaggcacgtgggcagcggctgggagcgctactgccctctgccaggctcccgcagctacaagcaagcagagtcagctctgcttagctggggagtgggtaagatgatggggtcgctgacctggctgtggccttcagagttattggtgtccttctcttgaggtggtcatggcttttgttttcttatttatccttccagaactagtcttttaatattttattttattttattttattttatttttggagacggagtctggctctgtcgcccaggttgcagtgcagtggtgcaatctcagctaattgcaacctccgcttcccacattcaagcaattctcctgcctcagcctcccgagtagctgggactacaggcgcatgccaccatacccggctaatttttgtatttttagtagagatggagtttcaccatgttgcctaggctggtctccaactcctgggctcaagcagtcctcccgcttcagcctcccaaagtgtcagaattacaggcattagccaccgtgcccagtcattattattatttatttatttatttattttttgagacagagtcttgctctgtcgcccaggctggagtgcagtggcacgatctcggctcactgcaaactccgcctcctgggctcacgccattctcctgcctcagcctccccagttgctgggactgcaggcgcccgccaccatgcccagctaatttttttgtatttttagtagagacggggtttcactgtgttctccaggatggtctgatctcctgaccccgtgatctgccagcctcggcctcccaaaatgctgggattacaggcatgagccaccatgcccggcctattattattattttaaaatagagatgggatcttaatatgttaccaaggcttgtctcaaactcctggggtactgcgatccacccatcttggcctcctaaagtgctgggattataggcatgtgccaccacaccaggccagtagtcttttaaaaacaagtaggtacaggccgtgcgcggtggctcacgcctgtaatcccaccactttgggaagccgaggcgggtggatcacgaggtcaggagatcaagaccatccagcctaacaaggtgaaatccagtctctactaaaaaaaatacaaaaaattagccaggcgtggtggtgggcgcctgtagtcccagctactcgggaggctgaggcaggagaatggtgtgaacccgggaggcggagcttgcagtgagccgagactgcaccactgcactccagcctgggcgacagagcaagactccatctcaaaaaaacaaacagacaaacaacaacaaaaaaaccaagaatgtacatattttatgtactgtatgtattaacacagaacaccatatgtgaggccctggtgcagaatctttaacattacagtcccagaaagaaccctataaaaagtagtagcttcacagtgaaagatcctagcagacaccaccttaaccaagggaccaacatttatatcaccagcaatgagtcatggtgatatcatgaagcccttggtatgacacacttagaaggatacatcatcacctctctggtattcttcctggtaatgcaaacacctcagtttattcaagacaaaccaaactcgaagacagtctacaaaataactgaccagcactcttcaaaagtgtcaaggtcctgaaagacccagggactattatagactgtaggaatgtatggagatatgacaattaaatgcaatgagggccaggcacagtggcactgtagttctagctatttaggaggctgaggcaggaggatcacttgaacccaggagttcaagtccagcctgggcatcatagtgagacctcatctctaagatagatagatagatagatagatagatagatagatagacagacagacagacagacagacagacagacagaaagaaagaaacgcaatgggccggatgcggtggctcacacctgtaatcccagcactttgggaggccgaggcagacagatcacaaggtcaggagttcaagaccagcctgaccaacatggtgaaaccccctgcctcagcctcccatgtagctgggattataggctcccaccattacgcccagctaatttttgtagtttttgtagagatggggttttaccatgttggccagggtggtcttgaactcctgacctcaggtgattcacccgcctcagcctcccaaagtgttgggattacaggcgtgagtcactgcacccagctggagtccccactcttaaccacagcgctacagtgtcttcatttagttgaaacaacatgctatatgttttaacttcaactttgtctatctcccttgtcccaggttgatgggatttatagtgatttattatgacaaggccactgcaataaatgttcctgtacatatgtcattcttcacacctacacttgtacttctgaggaatattctaaaatagaggatatacttgttcagaaggtaaggacatttgtcatttgggaaactatcaacaaattgcccacactcatcaacaatgttcccacagcctcctctgcgttacatgttgtcaagcattcttttatttatttatttatttatttatttatttatttatttttttgagacagagtctcgctctgtcgcccaggctggaatgcagtggcacgatctcagctcactgcaagctctgccccacagcttgacgccattctcctgcctcagcctcccaagtagctgggactacaggcgcccgccaccacgcccggctaattttttgtatttttagtagagacagggtttcaccatgttggccaggatggtctcgatctcctgacctcgtgatccgcctgccttggcctcccaaagtgctgggattacaggcgtgagccaccacacccggccgtcaagcattcttttcttttcttatttatttatttttcacccaaactaaaatgcaatggcatggctggacacagtggctcatgcctgtaatcccagcactttgggaggccaaggcaagcagattacctgaggtcagtagttcgagaccagtctggccaacatggtgaaaccccatctctactaaaaatacaaaaattagcccggtatggtggtgggcacctgtaatcccagctactcaggaggctgaggcaggataattgcttgaacctgggaggtggaagttgcagtgagctgagatcatgccactgtactccggcctgggtgacagagtgagattctgtaaaaaaaaaaaaaaaaaaaaaaataagcagtgtcatgatcatagctcactgtagcctccaactcctgggctcaagcaatcctcctgccttgccctcccaaaatgcacttttttaaaaagctctctctcttttttttttttttgtagaggcagggccctgccatgtctcccaggctggtcttgaactgctggcctcaaacaatctgcccatcttggcctcccaaagtgctggaattacagacacgagccactgcacccagactataagtgaacagctccctccctgtccacccactcacagtcagtctgggggtgagagatgctattattttacagcaggtggtcagggaaggcctctctgagaggtgatattagagcagagactgaatgaagttggggagaggccatgcaggcatcttgcagaaatgtgttccaggtggcaggaactgctattgtaaagaccctgaggtgggaacatgtttggggactcaagaaacacatctgtagcccagcgtggtagcgggtgcctgtaatcccagctacttgggaggctgaggctccagaattgcttgaaaccaggaggtggaggttgcagtgaaccgagatcatgccactccaacctgagcgacagagcgatactctgactcaaaaaaaaaaaaaaaaggagaagaagaagaagaaataaggagaagggagaagagagaagggagaaggggaagaaggagaaggaggaggagaaggaagaaagaagaaagaagaagaaggaggaggaggagaagcagcagcagaagaagaggaagaagaaggagaacaagaagaaaaagaggaagaggaagaagaagaggaagaagaaggagaaggagaaggagcagcagcagcagcggaagaggaagaggaagaaaagaaagaagaaagaagaaagaaggagaaggagaaggagaagaaagaagaaagaagaaagaagaagaagaagaagagggagaagaagaagaagaaacagcacatctggagggacttggaagaaaaggtacaaacagtgttacctgggagggtggcttggcttctctgaaccttgagtttcccatctataaaatggacctatgagtttctaccctcagaaggtgatggtgaggattaaaagagattgtggctggcatggagtgagtgttcccataacagaagcctttaggaacaagagcctctgccagatttctggataggaaagcttcgtgaggagggagcttgcagagcaggatgccaagataggccggtgcagagcagggctttgactttccccaaaacacacagacaaacacgtgtgagtgtgggttttatttttatttttacattttttgagtcagagtctcactcccgtggcccaggctggagtgcagtggtgtgatcttggctcactgcaacctctgcctgacatgccgggttcaagcaattctcctgcctcagcctcccgagtagctgggattacaggcatgtaccaccatgcccggctaattttgtatttttagtagacacggggtttcaccatgttggtcaggctggtcttgaactactgacctcaggtgatccacccgccttggcctctcaaagtgctgggattacaggcgtgagaaaccacgcccggccaagtgtgagttttaaatggttctgagcatcaggaaggttttagggggtcccctgaagttgaggagaggcatggctttcctacaatgactgtcctagacccttcgggaaaccgtgcctcttacaagatcctacacttctcatttagatggtaaactgaggcacagaggggctagagcctggaaaatgccagaaaggagcgaataagggatgacactcgggtgtctactgggattggggcctcgatatgggatcagccccctctaatgcctctacccccatctaccagacagagacgcgaagagagacggacaatacagcgacagcgacatgaagagaaacagaatgactcaaagaccaggcacagaaacagagacacagagacaaaggcagagacagaaaaaggctcagcgacccagagacggagatacagagacacagacctactacaatcagagggacaaggcagtccccgaaagggctgccccctgggggtacccggggctgccccgttggggggcacgccaagagctcccccaccccgcccccgtcgtgcctgggccgtgacttcagagtccgtgcagattctataaatggccaagaggccgcgggccggggggcggggccgagtgagtcatcgcgtgacgtcaccgccgcctggacctcgccaggtcccgcccccgcccctcccgggccgccagggggcgccggctgcaggtcctcacatgcgcagtagcgaactgcggcccccgagggccgctcagtttgggagggatccaggaatctgcgcgttcgaatcccgcccctgccaccctcgagctgtgtgacccggccattcggcgtcacctctctgtgcctcgtatagacccacctcataaggctgtcgtgaggaatgagttaacaggctcaaagctcttagtacgtagcaggtgctaattgttagctcattttatgtactttctattttttcttttttttttttttaaatagagacggggtctcgctatgttgcctaagctggtctcgggtctcgaactccagggctcaagcgatcctcccgccttggcctcgtattttatgtattttcgtgtatgttcaacatatcatgacatgccatcaactagcacattgccttagctcagtggttggcaaacaggggtgatctgcttccaccccgaccccaatcatgggacattggcaatgtgtgtagacatttcttcttttaatttttcttttttagagaccatggtcttgctatcttggccagatggttctcaaactcctgggctcaagggatcctcccacctcagcctccttagtagctgggactacagggtcctgccgcagtgcctcaacatttctgtttattaggactaagagagtgctactggcatgtagcaggtagaggccaggcatgctgcttgaagtcttacaatgaatgcccaaggcagccccccaaccatgaagaattatccagcctcagctgtcaacagtgtggaggttgagaaaccccaccttagcctcatagttgaggttcatggagcatggtctcaaattctcctctgcccctggcctgctgtgtgacgctgaaaaagtgattccaagcccccgtgcctcagtttccccacctgtaaagcaaagtacttgtattaataataacagtgtcagctgggcacggtggctcacgcctgtaatcccagcactttgcaaggccgaggtgggcagatcaactgaggtcaggagttcgagaccagcctggctaacatggcaaaaccccgtctctactaaaaatacaaaaaatagccagtcgtggtggcagacacctgtcatcccagctacttgggaggctgaggcaggagaatcgcttgaacccaggaggtggaggttgcagtgagccgagatagcatcactgcactccagcctggggaatagagactctgtctccaaataataataataataataataataataataataacagtgtccatctctgagggcgtcatgagaattgaatggatatatgtacagagttggaacatggcctgacataagggctgtagtctgtggcatattgcagccatgccattagcatgtgaccgataaactgcatatcctcaacatatcattagtgtgtggcaggttgcagacatgtcatccaagtgtcacaaacatggccttgccatgtggggcatgatgtgggcatagcatccacccctgtggtccaggggtgagatctggctgggtagggctgtttgacagggacacagttcacggcctgggacttgccaacaaagtcaccctgtagttcaggtgacacacaagtggatggggagggtgagacccaggatctcttctcccccaggtccttatgaggggctggaggagacagaactggggtgctggaccctcagcataaagaatgctataggctgggcatggtgactcatgcctgtaaatcccagcgttttgggaggccaaggcgggcagattgcttgagcccagaaatttgagaccagcctgggcaacatagcgagaccccgggcaacatagcgagaccccatctctaaaaaaataaaataaaattagccaggttggtggcacaagtctgcaattctaactacttggatgggctgagatgggaggatcacttgagcctgggaggtcaaggctgcagtgagctgtgattgtgccactgcactccagccgaggggacagagtgaaaccttgccttaaaaagactgctatggcccgagtccctctgctgtgccgggcactgtgctgggcatgtaacaggcatattcttctgatctttacaactctcccatgaggcaggcactatcgttagcccattttacagatgtggccatagaggcccagagaggagaaggggcttacctaaggctatagactgttggtatctggagataaacccgggatggtgctcactaaactaccttgggtgtcagtcctgcttcaagactccagagagataaagagagatgacctcagagacaaagagactcagacccagccagaggcccaatggacagtgggaggggtgggtggaagaaggctggtctctgtctgaccaagcccccccagaataacgcaggctgcccccctaggtggaaacaatgacacaatcagctcccaataccaagggcctgacatcacaaggggaggggaaggcagctgaggttgtggggggaggtgccccgccccttggcaggcccctacagccaatggaacggccctggaagagacccgggtcgcctccggagcttcaaaaacatgtgaggagggaagagtgtgcagacggaacttcagccgctgcctctgttctcagcgtcagtgccgccactgcccccgccagagcccaccggccagcatgtcctctgctcacttcaaccgaggccctgcctacgggctgtcagccgaggttaagaacaaggtagggctggagggcctccctggcctggcccacacgtcctgccaggccagagccctgagcttggggtcccttgaaccccctcctgcctatcctatgtgacttggaaactgagaggggaaaagggagtgatatgggataggggctgcctgtctccccctgaacatcccggagcccccagctatggttggggctggaatgggggggcacacagccacacataaacagagggggtcagtccattgcaaagatacccacctgatcagtcttctgttaacccttcgtgttcttggggggaacaacatagggggaagacttgttgatttttccatatcccccggcctgacaaagaaattggggagcgcttgagtgctggggtacctgggaagtgacgccgtgaaagtgtgggagatcctgaagacagagggggacggtgaaaggcaggaagcgggcatcagaagtgcggcaggggtctcctgactgtggagctaggaagatacctggacaccaccttcatgctatggttgggtaaactgaggttcggagaggagaggcaaatagctggggtcccaggtaaagcaggtacagcgctcggaccctggactcaccccccatacaccaggatgggctcagcttctcccagctggagaactttaagtttccagcccactggaatcgccccaacagtattgccgagggaggagttcctgccccatttgacagaggggaacactgaggctcagggtggcttttcccagggtcccatggtgaggaagtgggggactgggttggaacctgggtcgagggatctcggggctggaggagggggctggtggggggcgggtcctcgggcgagagacagatcccagcgccgccctcctcccccccagcgccggccccagagccgcgcagagccgcgcagagacgccgcgccttataaggcggcctcggggagcccgggccacgctatataagggccggtttgctttataaagccgggctggtggcgtggggggcggcagggccagggccaggtgagggggccgcccctcccacctccccccactcacccgggagaagaagaggcagcccggtcccctaggggctgggagcctggctgggcttgggcggagggttctggagaaatgggagtggagtgggggaggggggggacagtggagagagggaaaagcagggaggtggggggagaggcagacagagatactgggagcctgagacaccctagggacagacgggggagggcgagccaggagcgagataagacctagacaaggatggaggggcagggagaggagacagagccccaccacccccaccccaggcaggaaacctggagacagagaaagacctagagaggcagatatacaagacccaggagccctacccctggccagacagggactagccacctagagagatggggacccaagactgggccaagaaaagacagcgctggggaagagagagacagaggagtcggggggataagagggagagagacatacagacgtgcaaggggtgggggctaagacagagacaagcccccaccactaaccagagacagagccctggagctgaagacctgggggacacggagagacagagatgtatgaccagcactcctctgcaagccagcacccagggacacctccttagacatccttcttcccttcctgaggtgccctctcttccaacagggggcacagagggggcagggctagaggaagagaagccccaagtttggcctgggcgaaaaaccagggtgccgggtgccacccctctagctcagaggatccagctccccacaccccacccctcatctacattccctggtgccaaacctcagaatgcccggaatggccccctgggcaggtgccacctcagccctggctctcagcccgccccagcccccatcccccaactatggatctggggcaaaattgccttagttgggaaggacgagggagatcaggctctaggaagttcagacaggacccagggagcccaggctgcccccaatgcatcctcacccctttctctgtgccccctgccctcccctcgccccagctggcccagaagtatgaccaccagcgggagcaggagctgagagagtggatcgagggggtgacaggccgtcgcatcggcaacaacttcatggacggcctcaaagatggcatcattctttgcgagtgagtgaggctctcgaagccgagaccctgcaacatcccccaactccatgcagcccctcaacccccaaaacaaccatgatcctggaactgagttgaacactttctattggatacctttggggtggccagtaatcattgtgcccatttaacaggcacagaaaactgaggctcaggtgaaatgcattgcaccaagtcccacgtggtttcaagggaaatgactctagaatcttaaccaccatgctatatagggtaggcccatctgtggccgccagagtccccagaaagagcggtcacagctaaaaggcagcagccaacagctgttcatggctggcttggtgatgtgaggagagatgtgcagcaataattaaaggaggccctggttttctttctgttttctttttgtttttttgagatacagtcttgttctgttgcccaggctgcagtgcagagacacaatctcggctcactgcaacctccgcctccagggtttaagtgattctcctgcctcagcctccccaatagctgggattacaggcacgcaccaccatgcctggctaatttttgtatttttttaaagtagagatggggtttcaccatgttggccaggatggttacgaactcctgacctcaattgatccacctacctcagcctcccaaagtgctgggattacaggcacgtgccaccatgcccggttaatttttgttttttttttttttttttcagtagagatggagtttcaccatgttgactaggctggtcttgaactcctgacttcaagtgatccacctgccttggcctcccaaagtgctgggattgcaggcacatgccaccacgcctggctaatttttgtattttttttttttttttttagtagagacagtgtttcaccatgttgaccgggctggtctcaaactcctgacctcaagtgatccacctgcctcggcctcccaaattgctgggattacaggcatgagccacctcgcccgaccttcttcttcttcttcttttttttgagatggagtcttcctctgtcacccgggctggagtgcagtgacatgatctcagctcactgcaacctctgctttccgggttcaagtgattcttgtgtctcagcctcctgagcagctgggattacaggtgcccaccaccttgcccggataacttttgtatttttagtagagacgggattttgccatgttggcctggctggtctcgaactcctgacctcaagtgatccacccgccttagtctcacaaagtgctggcattacaggcatgaaccactgcaccctgccggccctggttttctcctcgcctcaaaacctcattgctgagggaggtgaaaaccctaacagctcccaagccccagttccactgcaatcttttttttttttttcagatggaatcttgctttgtgacccaggctggagtgcagtggcatgatcttggctcactgcaagctctgcctcccaggttcaagcaattctcctgcctcagcctcctgagtagctgggattacaggtgcccgccaccacgcccagctaatttttgtatttttagtagagacggggtttcaccatgttggtcaggctggtctcgaacccctgaccttgtgatccacccacctcggcctcccaaagtgctgggattataggcgtgagccaccgcgcccggctccactgcaatcttaatgcatagcagggccctaaacccagcctgcgcccgatctgcatttgagtctgacccagggcagagtgactgtgagtggcctcgggaagactttgaaggtgcagcttcatcaagtcctagatgctgggaagaaggggtgtggggggtgtttaccttgttccattcccatccactaggaacaaggaattggcaggtggggaggtaggcatgctggtgtcccagctcaggcagaggactgctcagacgtcaaacagtgcagtcccagcctgggcaacatagccagattccatctctacaaaacatttttgttttaattagcttggcatggtggcatgcgcctgtggtcccagctactcggaaggctgaggtgggaggatcgcttgagccctggaggtcaaggctgcagtgagctatgatcgcgccactgcactccagcctgggcaacagtgaaaccctgtctcaaaaaaaaaaaaactaatgtaaacgacaagttgatgggtgcagcaaaccaacatggcacatgtatacctatgtatcaaacctgcacgttgtgcatgtgtaccctagaacttaaagtataataataataataataataataataaaagagtgggccgggcgcggtgactcacgtctgtaatcccagcactttgggaggctgaggcaggcggatcacgaggtcaggagatcaagaccatcctggctaacacggtgaaaccctgtctctactaaaaaaaatacaaaaaattagccgggcgtggtggcaggcgcttgtagtcccagctactcgggaggctgaggcaggagaatagcgtgaacccgggaggcggagcttgcagtgagccgagatcccaccactgcactccagcttgggtgacagagcgagactccgtctcaaaaaaaaaaaaaaaaaaaaagacctaatgtaaatgacgagttgatgggtgcagcaaaccaaaatggcacatgtatacctatgtatcaaacctgcacatagtgcacatgtaccccagaagttaaagtataagaaaaaaaaaaagagtgtagtgcagtcacccacgcactccggtcattcactcattcattcattcattcattcacaaaagaagcatttatgagttcctgctgtgtgccaggctctggcctaggcactgggaacagtgaacagaacagactcgactcagagctcaaggacttttagtccagttgaggagatcaatcatataattgatcaaataatcacagatttgtggtcgtaagtgtcctggggaaaactcaagcggaagggaagatgggagggtcaggtatatgtctgcgggtggagagtctgcagtttcctagagagtggtctgggaggcctctctgaagaggtgacatttgaacagaaccttagatgaagtgagggagggctcaggggacctgaggcaaagcagagggggccaccagtgcaaaggcgtgaggtaggatcgtgcttggggtgttcaagaaacaagaaggaggctggcgtgacgagcaccaaatgattgagcagaagtggagatgaagtcgcagagtgaactgagagtcagatggtggagggcattttatttcatttatttatttagagacagagtcttgctctggtgcccgggctggagtacagcggtgcaatcatagctcactacagcctcgacttcctaggctcaactgatcctcccaccccagcctcttcagccccagcctcctcagtagctggaactacaggcacacatcaccacgcccggtgaagttttcgggttttttttttttttttttttgtagagacacgggtctcaccatgttgcccaggctgatctgaaactcctaggctcaagccatcctcctgtctcggcttcccaaagcactgggattacaggtgtgagccactgtgcccagttctacagagggcattttaggcagaggacttaggatttcattctgaaggcaatgggaggctcctggaggatttggaactggacggtaacttgaactgtttaaaaaaggccattctgggccaggggcagtggctcatgcctgtaatcccagcactttgggaggctgaggtgggcatatcacttgaggtcaggagttcgaaaccaacctgaccaacatggtgaaaccgcgtctctactaaaaatacacaaaatttagctgggcatggtagcaggcacctgtaatcccaactacttaggaggctgaggcaggagaattgcttgaacccaggagacagaggttgcagtgagccgagatcccgccactgccttccagcctgagtgacagagcaagactccatctcggaaaaaaaaaaaaaaattctggctgctggatgaagaagggtgggtctgtaggggatgaagtggaagttgggagctcattacaagaggccaggaaacagactctggtggctgagacccaggtggaggtggcggggagcagtgggtggttttctggactcattaaaaggcagagccaaagaactttggagggactggacatgaggctgagagaaggagaaagggggagttgggggcaagtccaagggctctggctgagcacctagaagggggcactgctaggcagggaaggtggagggaggggggagtctggagggggaagctgcatgtcaggagtctggagcagggtgagtttgatttgagacacccaggcacccatggagagagctgaatgagatggtaagaaacccaagctgcagggagatgagggagttgctggcatatggaggcacttaaagtcaagacactgaatgaggccaggtgctgtcactcatgcctgtaatcccagcgctttgggaggctgaggcaggaggatcgcttgagcccaggagttcaagaccagcttgggcaatacaaatacagtgaaaccccctctctaccaaaaaaaaaaaaaaaaaaaaagccaggcatggtggtgcgcacctgtgatcccagctactcggaaggctgaggtgggaggatcgctggagcctgggaagttgaggctgcagtgagctgtgattgcaccactgctctccagcctgggcgacaaagccacaccctgcatcaaaaagaaaaaaaaaagaaaagaaaagaaaaaagaggcgagatcattaaaggagtgagtcagagaagaggcccttgtgggcttcctgctgtctacaagagaaaaggatgctgagacacgcctgccagtgaggcttcggagatcccagagactcggacacaccttggataagcaggctttctgactgggacctgagtctagctccttggcatcagtgtcccatttgtgtgtgtgcttgggtggtttggaggggctgcagctgagagctgactgcagggagaagtgacgctagggtatggcatggccccttgtggtcatcccgtcaccctcctcctgctgggctgggctggagagcgggagtgggggacacctttctttcttttttttttttttttgagacggagtctcgctctgtccccaagctggaatgcagtgctgcaatctcagctcactgcaacctccgcctcctgggttcaagtgattgcctcagcctcctgagtagctgggagtacaggcatgtgccaccacgcctggctaatttttgtatttttagtagagatggggtttcaccatgttggccaggatagtctcgctctcctgacctcgtgatccacccgccttggcctcccaaagtgctgggattacaggcgtgagccaccgtgcccaaccctggggggacacctttcttaccccttccccactcttctcagattcatcaataagctgcagccaggctccgtgaagaagatcaatgagtcaacccaaaattggcaccaggtgagcccagacacaatctcttccatccttgcccgcaagcccctcagacctcccctccccacccagtgaccaccacctgcccccctctagctggagaacatcggcaacttcatcaaggccatcaccaagtatggggtgaagccccacgacatttttgaggccaacgacctgtttgagaacaccaaccatacacaggtgcagtccaccctcctggctttggccagcatggtgagtgtggttgcaggctgggcagggggtggtgggcagcctgggctgggatgcaggtgtggccacttgtgctcctgagcccagtgaaggtggcggagcggggggcagggatcggggagcaggtgctgtcaacagcgtccaagggggccgggcgcggtcgctcacacctgtaatcccagcactttgggaggccaaggtgagcggattgcttgaggccgggagtttgagaccagtctggccaacatggtgaaatcccgtctctactaaaaatacaaaaattagctggacgtggtgacgcatgcctgtaatcccagctactcaggaggctgaggcaggagaatcgcttgaacccgggaggcggagtctgcagtgagccgagatcgtgccactgcccagcctgggtgacagagccaagactccgtctcaaaaaaaaaaaaacaaaaaacaaaaaacagtgttggccgggcacggtggctcacgcctgtaatcccagcactttgggaggccgagacaggtggatcacaaggtcaggagattgagaccatcctggctaacatggtgaaaccctgtctctactaaaactacaaaacaaaattagccgggcatggtggcaggcgcttgtagtcccagctactagggagactgatgcaggagaatggtgtgaagccgggaggcggagcttgcagtgagctgagatcacgccactgcactccagcctgggcaacagagcgagactctgtgtcaacaacaacaaaaaaacagtgtccaaggggactgtgcagcctggaggcccccttgtcagtccctgctttccctgccccacctaggcgaagacgaaaggaaacaaggtgaacgtgggagtgaagtacgcagagaagcaggagcggaaattcgagccggggaagctaagagaagggcggaacatcattgggctgcaggtaccgccctgtcctcactgcgcagaggtcatagaggccaggagggcaccctgatgtctgaaggcttttggggacaggatatttggcattaactatactataggccgggtactgtgcttatgctcatcttccattcacaaactcactcactctgccaacaccccagcagacaggtgcttgttatcaacataccctttccgcagatgagaaaactgagacccggagaagctggctcgcttttgcacagatcttccagctgatgcgtggcaggctggaacttcaatgctagaagtcagtcatgtgataggcccactctgggcctcagtttccagtctcgaaaggatgcctcaggcggggtgcagtggctcacacctgtaattccagcacttggggaggctgaggcaggaggattgcttgaggtcaggtgtttcagaccagcctgggcaaaatagaacccccctccaccgccatctctacaacaaatttaagagtttagccaaatgcagtggtgtctgcctgtggtcccagctacttaggaggctgaagtgggagaatcacttgagcccaggagttcaaggttacaatgattgcatcactggactccagcctgggcgacagagtgagaccctgtctctaaaaatgaaaatgggctgggtatggtggctcatgccagtaatcctagcacttcgggaggccgaggcaggcggatcacttaaagtcaagagttcaaggccagcctggccaacgtggtgaaaccctgtcactaccaaaaatacaaaaactagccggtgtggtggggcacacctgtagtcccagctactcaggaggctgaggcaggagaattgcttgaactcaggaggcagaggttgcagtgggccaagattgtgccgctgcactccaacctgggcgacagagtgagatgctatctcaaataaaataaaataaaacaaaaaaatagaatagaacaaaataaaatataaaaataaactaaaaaatgggccaggcacagtggctcacccctgtaatcccagcactttgggagggtgaggtgggtggatcacctgaggtcaggagttcgagaccagcgtggccaacatggtgaaaccccatttctactaaaaatacaaaaaattatccgggcatggtgatgcccacctgtgatcccagctactccggaggctgaggcaggagaattgcttgaatgtgcaagatggagatttcagtgagctgagatcatgtcactgcactccagcctgggcaacagagcaagactccgtctcaaaaaaaaataaataaaataaaataaaaattgaaaaaaatgataaagcggcgcctcatcctctcccatcagctatgcctcatggcccatgatgaggtctgtaattattggtgtgattctccttctggcttcctagatgggcaccaacaagtttgccagccagcagggcatgacggcctatggcacccggcgccacctctacgaccccaagctgggcacagaccagcctctggaccaggcgaccatcagcctgcagatgggcaccaacaaaggagccagccaggtgagtgggggcccccgggacacgccgtcaaggcccaggaccctggccaccccacggcctgaccacaccacccttcgcaggctggcatgactgcgccagggaccaagcggcagatcttcgagccggggctgggcatggagcactgcgacacgctcaatgtcagcctgcagatgggcagcaacaagggcgcctcgcagcggggcatgacggtgtatgggctgccacgccaggtctacgaccccaagtactgtctgactcccgagtacccagagctgggtgagcccgcccacaaccaccacgcacacaactactacaattccgcctagggccacaaggccttccctgttttccccccaagggaggctgctgctgctcttggctggacccagccaggcccagccgaccccctctccctgcatggcatcctccagcccctgtagaactcaacctctacagggttagagtttggagagagcagactggcggggggcccattggggggaaggggaccctccgctctgtagtgctacagggtccaacatagagccgggtgtccccaacagcgcccaaaggacgcactgagcaacgctattccagctgtccccccactccctcacaagtgggtacccccaggaccagaagctcccccagcaaagcccccagagcccaggctcggcctgcccccaccccattcccgcagtgggagcaaactgcatgcccagagacccagcggacacacgcggtttggtttgcagcgactggcatactatgtggatgtgacagtggcgtttgtaatgagagcactttcttttttttctatttcactggagcacaataaatggctgtaaaatctcctgaggcctcagagctgctctgttttagatatgcgccatatcccgcacacacatctgcacggacacacatgcccacatgcaccctaagacgtacatacacactcacacgcaccctaagacacacacctcactgtagccactcagctagacacaggacaggcaccccatcacactcacatgcaaagtccacacacacacacacactcccccctttcacacacagatatgcacacacaggcagtacacactccctacgacatgtaaaaaaggcatagccagccgggcacagtggctcatgccggtaatcccagcactttgggaggctgagatgggaggatcacttgaggtcaggagttcgagaccagactggccaacatggtgaaaccttgtttctactaaaaatacaaaaattagcagggtgtggtggcgcatgcctgtagtcccggctacttgggaggctgaggtaggagaatcacttgagccctggagatctaggctgtagtgagctgagatggcgccactgcattccagcctgggcaacagagcaagactccatctcaaaaaaaaaaaaaaaaaaaaaaggcacagccagagagccaatgcgcgcgcgcgtgcacacacacacacacacacacacacacacacacacacgacccacactgctctcccagaggcttgtggatggtggtgacaaagagcctgagtactgggacaggctaaatggcatgtgaatcacagagcagctgcctggatgacctcgggcaatcactttccctccctagacctgttttcccatcaaaataatggggacagtaagcctcttgtggtcatgaaatgacacccccagatggggtgatgttctacatgtttaatcgctggtaaagaccaggcatcaatagagaaaggatgacaagtaggggtcctggtgggccctgtgggcagggtgaaccctttagccccagactgtggggaggggaaaggggacagggagaggggcacttctgagccaaggcaatggccctttactgactggcacagggcaccatagggcacggttaattctgtgcgccccgcccgctctcagccgtcttaaggctgagcctgccaacccgggactctaaaaggctgtgtccagggcctcaacctcctcacatttcagaggggaccctgttatccccgggaggagggagaggtccccaaccatcaggattccaaggaggagaggaggcagagaagcgaggagcgcggcacggagctgtcttctccccagggagggcaggagttgaggctggaacgtggagacctgcggaggcagacaccagaagacccgcgcacagacgcacgcagcccctggggcctcgtaaaccggattccaggcgcttttggcctggctaccgcaagtcctgctccccctgggccggcgcggggaagctatgctgaggaggatccgggcctggcccagggccctgcctcctcgggaaaacagcaccatattagcacttagcctgtgaggctggggtgggcgggcggcaggaagggcctcgggtgccagaggaatgagccccctttttgctggatcccagagggccatcaccctaaacctaggtgcctgtccaccactctgcgcatgtgtgccggctcctgccagggctagcagaccttacctgggatcttggaggtggcgggataaccagggaagacatgtcatggcagagtgggcctgagggggtgcacaggccagacccagcagcccagtctggcagccagggcttccgggccagctcaatgtctccccccgctgttcacatccgtcagtgccctgggtgggccccagagccgctcaaaccatgcctggcacttccatcctcagcatggctccgggaagaaggtgctttcatcccctgcactgtagcaacgaggactctgaagcacaggtcacctgccacccgggctcatgaggccaggtggagggtctggcactgccccaggttgctgggtgttgtggtccttgtcaccggtgcgaccagctaaggggacatcagccctcaggtgctccccatcggccacacacatcccgccccaacaccagccttctgagagtcctcaccacccttgaataaaggcccctttcatgtttccctcccgtgtccctcttccactcactacctccagaacggcctgtaagctgttccctcagcctggactctgggctcacaagaagtcagactgtaagctgtggagcctcgtttcctgggttcaaatcccccctgtgccactttctggctgtagggtcttgggccagtgacctccttcacctctagcctctgtttcctcatctttgaacttggggttagcttggcacctgccccacaaagtggctgtcaggacactggggcgacgcaggaaggccagaggtcagcgtctggctagaggtggccctacggtgtcactgtctcagcctgcccctcccagaagcctcctctgaccacctgttctgtctcacctcccccatttcctattgtgactgctgtaaacacctggccagatgtctgcctgctccaccaccctgaatgcttactgactgaataaaacgctgggtggtttgaagggctggtcacatgggccaccaggccacctcccgaacgtcagagcctcaggtcccctctccttcttctggtgaccaggcagacgcagaacccaagacatcacggacagcaagggatgtgcgctggctgctttatttaagggcttgtgattgacagctgtccccatcccagcccttgcttcctctacaaaagcaactgaacatgaaacgggcttcctggttaccatggggaggggggcggctccctgtcagggcccagcccagggacctggggaacggcggctttgaatccccggccacgggcactagaaggtggagaaggagagcgggaagtccagttgagatgggcacggtgctggtgaggaggctggagaggtcctgttccagcctctagtgggcttcccttgtccaggatgtcaggaaacagtcccccaattccgccggggggagccagagccccaaggctggggggccaggggctgcagggaacacagcaaaggctttcggagccaagtgagatcagttcaggcccctcaggcccaggaacccgacaccaccgcgtacctgtgagcacacactcacggccaccccagtgacacgtgcagccacacacacccacactcactcacacccacacccacacgcacacccactacacacacacacacacacacacacacacacacacacacacacacacacacggctgtgacagcccaggacccacaccctggacccctggaatgtctctggaccagaaccgaacagctggatccacagtacgcggggctgctcagggggcgggtcctctgtgtcgctactgattggccgcctcgcaggcgtctatccaatcactgtacacatccacgggttctgacagatctgggccacttaggtcaagggcgatcattggcattggaaccctgccctgcatcttctcaccccacagaaatcactaggtggcacctgttcctctggacggctttggccctgcaccagggcacacagtgggccagatgagcagggtccggactccagccccctccccaccctctggaaaaagcccaggtttccaaggatacacgttatgggcgtctggaattcctctaggcacacggtacaagagatgactccggtgttgcgggcacggtccctgaaacagaccaagagaagggactggtgagcaatgcgtcctgggcctgtgggtgatgacgccttcaccaagggaggcaaggggcaggatggagaacagcggggaagaggcagtggggaggctggatcccttgccctgttccccactcacattttcacatcacaggatttctcgtggttgcagaaggggcaggtgaactgggtctcgagggtgcctgtcatcttcttcttgggaggcggctttcgttttgactttctgcgccccatgtctgcaggtggatgagcctgtggggagtggcagatgtcagtggtttgaggaaaccacgcagcgccccagctcaatgctctagaaagcaggccggaaagagggtctgggacttgcaccgtggtcccggggcctctgcccttgagggacgaggccctcagtcctgatgcaggaggacaattccctgtcccactctggatggaaggggtgagacgaggctctaaccccatctctctcacttactgcgtgacctgggcaggttatttaagctctttgtgccacagtttcctcgtctataaaacagagacaaggccaggcatggtggctcacacctgtgatcccagccagcactttgggaagctaaggtgagaggattacttgatgccaggacctggataccagcctgggcaacatagtgaggcctcatctctaaaaaaaaaaaattaaaaattagccaggcatggtggtgcaggcctgtagtcccagctacttgggaggctgagatgggaggatcgcttgagcccaggagtttcaggtttcagtgatgatccagagttatgatccaggcactgcactccagcctaggcaacaggatgaaaccctgcataaaaaaaaaaaaagaaaaaaaaaaggccaggtgtggtggctcacacttgtaatcccaggactttgggaggctgaggcgggcggatcacgaggtcaggagttcgagaccagcctgaccaacacggtgaaaccccatctctactaaaaatacaaaaattagctggccatagtggcaggcacccgtaaccccagctactcaggaggctgaggcaggagactcacctgaacccaagaggcggagactgcagtgagccgagatcgcaccattgcactccagcctgggcaacagagcaagactccgtctcaaaaaaaaaaaaaaaaaaaaagtcgaaataaggttgctatctcagaggagacttgtggggctgacaccaggaatggtaagttaagtacttagcacagagctggcccatcatcgctggcgccaatacaaggaagccactgttcctggggagggtggcacaagagactccaagacaagccagctgttcagggccgggtggagcctaagagcctaggaactggtgattttattctggctgctcctcttggcaaaggacatgtaagtaccatccaggaggagtgacactcaggttatctgatggcctcgatccagatgacagactgcagggcagagaagtggggacaggcacttctgagtagaggaacactgtgtgaaggctcagggcagctgtccgtcccctggcaggtgagggagagaggagggacaggtgggagggttctgggtgtttggatggatcctgggagctacaaggagtgaaaggacaaagtcaccctgtgcttttgaggaactgcggtgtgagccataatctggatgaagacaaagtcacagccaggacagggctgttggggtagagatggcagagggtgagagagacagaggagacatggcggcagagtgagtgagtgtgacgagagaaggaaagtccaggatgactcccaaggttgtggcggggacatagtggctagagggacaaggtggcatcattctctgatgtctaacacataggaaggacagggttttggagaaaatgatggggttgggtggcagagggatatctaggaacagatgtccaggaggcaggtgggtggggaaacggcagcagttaccactgagcccaactcccctgcgaggcacggtgctcagggcactgtgtttgccatccctgagcctcctatggcgcctcctccaacacacacacacacgactgctggttctagcatcgttccactgtgacggggaggtcagcagcctgccagtgtcttccagaataaacagtggagtttcattcattatctgctgatcacttcctatgtaatacccccaactctttcttttttttttgagatggagtcttgctctgccgcccaggctggagtgcagtggcatgatctcgacccactgcaacctccacctcccggcttcaaatgattctcctgcctcagcctcccgagtagctgggagtacaggcatgcactaccacgcgtggctaattttttgtatttttagtagagatggggtttcaccgtgttagccaggatggtctcgatctcctgacctcgtgatccgcctgtctcggcctcccaaagtgctgggattacaggcgtgagccaccacgcccagccaacacccccaactcttaactgtgatgcttccagttcactgagtaaatagaagcaatccaaagacagctcctaggaccaactcattcagccattcacccaccctctttatttatctaagagatgaggtcttgctctgttgcccaggctggagtgcagtggcatgatcacagcttgctaaagcctcaatcctctggcctcagcctgctcagtagctgggacaacaggtgtgcaccaccatgcccagcttcggcatgcctcctttactatggaagtaagttcctgcaaaaacaatttgttcattctgccctggctcccatccccttttctttgagcaacatcaaattttccagctccactggatcactctcacacacttgttattacctctctcctcatttaaaaagggggaaaaaaaaactcttcatcctcttccagctatgatccttttctctgcaggctgttttagtgtacagccatctgcattcccacccatctctctgcaccccttgcctccaaacttaggttactggtggctccatactgcaaatcccaatggcagtcctcccattccagaggtccttcctcccctgagagcacatgtggctctcaggatgccatgtgctccctgtcctctgcctcactggtggctcctgctagtctcctatgctcctgcctctctgccaacttgctccaatgaagagagcacgtgagtttgggccaggcgctgtggctcacgtttataatcccagcactttgggaggccaaggtgggcagatcacttgaggttaggagttggagaccagcctggccaacatggtgaaaccccatttctactaaaaatacaaaaattagctgggcgtggtggcacatgcctgtaatcccagctaatagagaggctgaggcaggagaatcgcttgaacctgggagtcggaggtttcagtgagctgagattgtgccaccgcactccagcctgggcaacagagcaaaacttcatctaaaaaaaaaaaaaaaaaaggctgagtgcagtggttcacgcctgtaatcccagcactttgggaggccgaggtgggcagatcacgaggtcaggagttcgagaccagcctgaccaacatggtgaaaccccatctctactaaaaatacaaaaattagccaggcatggtggtgcacgcctgtaatcccagctactcgggaggctgaggcaggagaatcacttgaacctgggaggcggaggttgcagtgagccgaggcactccagcctgggcaacagagcaaaaagcccatgagtttaattgttggatcctctcctttctggctatactcaccacatgaagatttcacccagtcttagggcttcatgcctactctacactgaggccacctgcttctccagccttgagtctgaactgcagactctgatctatctgcctcagccacacctccacctgatgtctaacttccacctaagattaaacatatcatgtccaaaaccaagcccctgacattgcaacctgctcttccagtcttcctcatctcagctaacagcaattccatctttccggataatcaaatcagaaaccttggattcatcctcaatgtctttttccctcacacattccttatgcgatcctccccctgcccctctacctctgaaatataaattagccgcggcaccacgcccagctaatttttgtattttttgtagagacagggacccaccatgttgcccagcctggtctggaactcctgggctcaagagatactcccgcctcggcctcccaaagtgctggcgttacaagcatgagccaccgtgcccagcaataaccattactgaataaatcactcaatcagtttgcttgtaactctatcactttgggacgtcacgcccgtaatctcatcactttgggaggcccaggtgggaagatcgcttgaagccaggagttccagaccagcctgggaaacagagtgagacccttcatctctacaaaattacaaaaattagccttgagtctgtagtcccagctactcggcaagctgaagtgggaagcttgcgcccaggaggtcgaggctgcaatgagctatgatcgcgccactgcactccagcctcggcgacacagcaagactcactctcaaaaaaaaaaaaaaaagtccaaacaaaatctacggatgagccccagaagctcattttgcccagggactacagtctccccatcccatgaatggggtctggcttgcacaaggaatgcagaggcctcagcctgtcctgtgacaacgttaagtccaagagcgccaaaaggggatggcagaggagtcatcccccgaatctgctggtacccaagaggtggggggttggctgttcctccagactcactaaagcttcggcatcgcctcccgacggccgccgggaggagccaggcgtcccggtagtcgcgcttggaaggatggggtcggggggagtcagtctccccgaccggctttcccccaagctcgaggtcccaggagcctcctccaggaccccgtaaacgcacggagtagaggaacttccagtcctgcccacccccaacgcccactcgcacgagccgcaccagcactcaccttctccagctgcgaaagctccgttcacccgggagatagtgacttccgactcctgccggaagcggaaacccctctcctactttcaggtcccggccacccccatcccggacagcccagcaaataggccctgcctccttcgccgctcctctgagcgcacgcgtactcaaatagcagcgctccgacggagacgcagtgcgcctgcgcaagagccggtgcgtatttgcctgtacctacgcgcgatgccagtacttctggtcagtttccaggagcggcaagtgaggaatatgaaataaccttatggctgaatcagggtgaaggggaagcttgtaagcatggaagacgctctactcaaactaaaaagttcaagttctgatccagcagatgaagagggaggcctgagaggctgctgttctaactcgctcccaggtgacttccatgctgctgatccgcagaccacattttgagtgcccagattgtagtagatgaggttgagtggacaggctggggccagattccatggagcctcgtgggccgtgttaaggatttttattttttatttttgttttattttattttatttttttgagacggagtctcactttgtcgcccaggctggagtgcagtggctcgatttcggcccactgcaacctccgcctcccaggttcaagtgattctcctacctcagcctcccgagtagctgggattacaggcgccggtcaccgcgcccggctaatttttgtagttttttttttttttttttttttgagtagggatggggtctcaccatcttggccaggctggtcttgaactcctgacctcgtgatccacccgcctcggcctcccaaagtgctgggattacaggcgcgatccacccgcctcggtctcccaaagtgctgggattacaggcgtgagccaccgcgcccggccaaggacttttattggtttttatttttggttttgtttttttctgagacagggtttcgctccgtcgcccaggctggagtgcagtgacgccatatgggctcactgcaaccttagcctcccgggttcaagcgatcctcctgcctcagcctcttaagtagctgtgattacaggtgcgcactaccatgcctggctaatttttgtatttttagtagagatggggtttcaccatgttggtcaggctggtctcgaactcctgacctcaagtgatccatccacctcggcctctcaaattgttgggattacaggcatgagccaccacacctggcctgaaaaagatatttcaagatggagagagagaggggttagctgtgtcacgtgtccctgagttgaagaagatgaggaaagagaattgacagttgagtttggcaagggtctggtccctgcggaccttgataagagctgttgcattagagtgttcaggaagataatttgtaatgaaatgtatttcgaatacagatgctctttgatttacgatggggttacatcccgataaacctatcataatcaagtcaggggctgtctgtagagggatctctaggatatcccctagggggcagtgttaccctggtaaccgtcaagtgtaaccagtagaactgccctcttgtgagaccctttttcagtgctggagcaaactagaatacacacaggatggaatcatactatacagttaccgtgcaacttgctatttccacttaaccatctatacacgtatacctaacttttgtttttagtagctacatgattcatagtgcaactctgccatagtataatcaacggttatcctactgatggacaattcctggactttcctgagttttgccactgtgatgatgcagtaaatgtccctgaatcagtatccttaagactggatctttagtgaagcatagttttcaaaaaatgacatttgtgagtacagtgtctcaccccagtaaccccagcactttgggaggccgaggtgggaggactgcttgagcccaggagtttgaggctagcatgggcaacatagtgaaatcctgtctctaaaaataaaataaaataaaataaaaaacaataaatgatggccgggtatggtggctcacacctgtaatcccagcacttttttgtttttgcttttttttttttttttttgagacagagtcttgctctgtggcccaggctggagtgcagtggcgtgatctcggctcactataacctccacctcctggattcaagcaattctcctgcctcagcctcctgagtacctaggattacaggtgtgcgccaacatgcctggctaatttttgtatttttagtaaagatggggtttcaccatgttggccaggctggtcttgaactcctgacctcgtgatctgcctgccttggcctcccaaagtgctgggattacaggcgtgagccacggcgcctggcccatcccagcactttgggaggccaagacgggtggataacctgaggtcaggagttcaagactagcctgaccaacatggtaaaaccttgtctctactaaaaatacaaaaattagctgggcatggtggcaggcacctgtaatcccagctactcaggaggctgaggcaggagaatcacttgaaccccgggaggcagaggttgcagtgagccgagatcgcgccactgcactccagcctgggcaacaagagtgaaactccatctcaaaaaaaaaaaaaaaacaaagacattgagtcacaggatgtatatatctttcattttgttcatgattgccacattagttttctctttttctctcctttcatcccttccctctcttacttccctccttcccagctttgttggatgtaattgactgaacatgaactgctcatatttaaaccatgcctggccgaaattgcatgttttgacatacaggtatatcattaaaacatgaccataatcaagacaattatttccatcaccctaagaaatttcctcttaccagtagccgagtgtgatggctcatgcctgtaatcctagcaccttgggaggccgaggtgtgcgaatcacgtgaagacaggagtttgagaccagcctgggcaacacggtgagaccccttgtagtctccactacaaatacaaaaattagccagacatagtggcacacgcctgaagtcccagctactagcgaggctgaggctggagaatcacttgaacccgggaggcggaggctgcagtgagccaagattgtgccactgcactccagcctgggtgacagatcaagactcagtcttaaaaaaaaaaaaataagaaaaaaaagaaatttttctcttgcccttttgtgctctgtcccctactccagcccctggccctaactgatttgtttttggttcctgtaactttgtctttttcagaaagtcatataagctgaatcatacaacgtgtagccttttgagctgggcttctttccccagcataagatgtttgaaactcactcatgttcccagcattttgggaggccaaggcgggtggattgcttgaggtcagaagttcaagaccagcctggccaacatggtgaaaccccatttctactaaaaatacaaaaattagctggatgtgttggtgtgcgcctgtaatcccagctacttgggaggccaagccaggagaatcacttgaaaccaggaggcggaggttgcagtgagccgagatcacgctattgcactccagcctgggcaacagagccagactctgtctcaaaaaaaaaaaaaaagaaaaaaaggaactcactcgtgttgttggatatgtcagcagtttgtttcttttttgttttcttttgagatggggtctcactctgtcacccagactggagtgcagtggcaccatcatggttcactgtagcctcaacttcccaggctccagcagtcctcccacctcagcttcccgagtagcggggattacacctgtgcaccaccacgcccagttaatttttgtgttttttgtaaagacaaggttttgccatgttgcccaggctggtctcgaactcctggactcaagcaatccacctgccttggcctttcaaagtgcttggattataggcatgattattattcagttgtattctgttatatgaatgtcccacactttgtttatcttttcacctgttagtgacctgttttttgcattgttgccggttgttgaacaattattagagctgttatgaaccatttctttcattttgagggtggcagatgacaccactccaaaatatgccactttggcatatggattgtttcagctaagtgcacttgaaaaacagtaggtgcaggaaaagcactctgacctccctcttttctctggaaaacgagataaacccccatatggaagatgccctccccatcccaggaagaaagtaaaattctttttagacagggtctcatcctgttgcccaggctggagcgaagtggtgtgatatccacttcctgcaacctcactgcaacctccacctcctagtcttaagcgatcctctcgccttgtccccaaaatagctgggatcacaggcgcccaccaccatgcccagctaatttttttgtatttttggtagacacagggtttcactaagttgcctaggctggtgtccagctcctgagctcaagtgatccacccgcttctgcctcccaaagtgctgggattacaggcctgagccaccgcgcccagccctagagcgtacaattcttatcaccagaagacagggagtcaaagctgaggaaaaaatgtacaaacaaaccttgttaaatgaacccttatttttctagttatttttccaccattaactgctctagcccaaacccctttgtcttgtcacattttcataatttactacccttttaaaactttatttataatatttatttataattttaaaatttatttatatatttatttagagacggggccttactctgctgcctaggctggagtacagtggcacaatcatagctgattgcagcctcaaactcctgggctcaagcgaaactcccacgtcagcctcctgagtacctgggactacaggtgcgtgccacccagctaattttattttctgttgttttagagatggggtctccctgtgttgtccaggctgttcttgaactcctgggtccaagcaatcctcccaccttggcctcccaaagtgttgggattactagtatgagccaccacgcccatctataatttactactttttttttttttttttttgagaagtctggctctgttgcccaggctagagtccagtggtgcgacctcagctcactgcaacctttgcctcctaggttcaagtgattcttctgcctcagcctcccaagtagctggaattacaggtatgtgccaccatgcctggctaatttttgtatttttagtagaggtggggtttctccatgttgattaggctggtctcaaactcccaacctcaggtgatccgcccaccttggcctcccaaaagtgttgggattacaggcatgagccaccatgtccatccataattttctactgtttgtctaatacagtaaataagtgtttgactgtaactgcttctttgggtcttccttttcagggctcccatgtcccatagaacttatgttaaatatatttctatgcttttctcctattaattgatcaaatgtcagtttaagtcttaggccccgccagagatctaagagggtagaggagaaatcttgccttccctccacaggtctttgtgtggatgttcatttgcatctttccctgtgattgcttgcttgcttgcttgcttgattgattttgagacagggtctcactctgtggcccaggcggaagtacagtggcatgatcatgactcactgcaggcttgacctcccaggctcaagtgatcctcccaccttagcccctgccccaccctctccaccccaccctctcaaccccctgagtatctggaactacagataagcacctccatgcctgtttacttttttatttttattttttatttttggtagagatgggattcactatgtttctcaggctggtcttgaacccctaggctcaagcaatccacccaccatggcctcccaaagtgctgggattacaggcatgagccaccacatcctgcctccctgaaatatttgattccttcggaatttatttttgtatgtggtctaaggtagggttcaggttttgtctcattctagtgcaaactgacaaggcaaataacacctccttttccatgaagttgcaatgcgaccttgaacctatattatgttcttaaataaatcttcctgaatttgttcttggattccctcagtattttcctgagtcaatgctatattgtttttgtatttgtttctactttctctcttgatattttcccgagccaatgttttgttttggtttttttttatttttttttattttagagataggatctcactccatcatccaggctcaggctggaatgccgtggtgtgatcattgctcactgtagcctccagcacctgggctcgagggatcttcccacctcagcctcctaaatagctggaactacaggcgtacacctccatgcctggttaatttatgtattttttttttaagttggggccttgctatgttgcccaggctggtcttgaattcctggccttaagtgatcctcacatcttagccttccaaagtgctgggattgcaagtatgagccaccacaccttaccctgagtcaatgtcaatgtccttttttttttttttttgagacggtgtcttgctctgtcacccaagctggagtgcagtggcgcaatctcggctcactacaacctctgcctccagggttcaagtgattctcttgcctcagcagcctcccgagtagctgggattacaggtgcccaccatcacacctggctaatttttgtatttttagtagagacagggtttcgctatgttggccaggctggtcttgaactcctgacctcaggtgatccacctgcctcagcctcccaaagtgctgggattacaggtgtgagccaccacacctgaccctgagccagtgtgttactattttgatgactgtatgttttgctattggtaaggcaggtatctcaccttcttattcatgattcttggcctgggatgctgtttaggaagtggacatggcctgagtgtcaagtgacagacagcctactggctgcatgagaatgccagtccctttttcagcctctagtttgacaagcagagtggcaagatgatagtgtctgtgacagctgaaatcaggagtggttggttgctcaggaggatcgagaagagatgaaaccctgccacttgcctgagggactctgctgtctcgtttcttgcaggttaaaaggcatctttccaaaaatggctgaacctggtgtggtggctatgcctgtaatcccagcattttgggaggccaaagtgagaggatcacttgaggacaggagttcaagaccagtttgggcaacctagggagactccatctctctttttttttttttttttttgagatggagtcttgctctgtcgcccaggctggagtgccgtggcgcgatcttggctcactgcgagctccacctcccaggttcacaccattctcctgcctctcagcctcccgagtagctgggaccacaggcgcccgccaccacgcccggctaatttttttgtgcgtgtgtttttagtagagatggtttcaccgtgttagccaggatggtctcgatctcctgacctcgtgatctgccctcctcggcctcccaaaccgctgggattacaggcatgagccaccgcgcccggcatttttttttttttttttggagacagagtctcagtccattgcccaggctggagtgcagtggtgtgatctcgactcactgcaacctccacctcccgggttcaagcagttctcccaccttagcctcccaagtatctagggttataggtgcacaccaccgtgtctggctaatttttgtattttttggtagaggagggatttcaccatgttgaccaggctagtctcaaactcctgacttcaggtgatctgcccgccttggcctcccaaagtgctgggattacaggcgtgatgtaccatgcccgaacaccatttcttaaaataaataaattaggccgggtgcggtggttcatggctataatcccagcacttcaggaagccgagatggacagattgcttgagcccaggagttcaagaccagcctggacaaagtggtgaaaccccctctctacaaaaaatacaaaaattggctgggtgcagtggctcacgcctgtaaccccagcactttgagaggccgaggtgggtggatcacgaggtcaggagatcgagaccatcctggtcaacatggtgaaaccccgtctctactaaaaatacaaaattagctgggcatggtggcgcacttacctgtagtcccagctactcgggaggctgaggcaggagaatcaattgaacctgggaggtggaggttgcagtgagccaagatcaggccactacactccagcctggcgacagagcaagactctgtctcacggtgaaaccccgtctctactaaaaaaaaaaaaaaaaaaaaaattagccgggcgtggtggcgggcgcctgtagtcccagctactcggagaggctgaggcaggagaatggcgtgaacccgggaggcggagcttgcagtgagccgaggctgcgccactgtactccagcctgggtgacagagcgagactccgtctcaaaaaaaaaaaaaaaaaaaaaaaaaaaaaaaattagccaggtgtggtggtgtgtgcttgtagtcccagctgttcaggaggcttaggtgggagggaggattgcttgagccccggagacggaagttgcagtgagctgtgatcacactactgtactccagcctgacagcctgggcaacagagtgagaccctgtctaaaaaacagaaaagtaaagaaaaaaataaaataattaattaagatggctgagtgctggctggtgttgtctcctcagcaagacagaagctccctgagggccagcgcccaccctgatttattcctcctagtgtccttgggtccccagctgcctggcacagagctttggtccttggtgctcggtagaagtgtctggctgatgtagaggagggagcctgagttacaatcccccctcccctgccactcagtcttcgtgtgacattggatgtgtcacttcttctttctgtgctctgggccatgagaacggggtccttgggctatgatggtgacctctgattcagactcctgcctgtctggtgcctctgagtcagtgagaagagcgcggctgtgacctccctagactgttgtggttaagattgagggactgccacttcctagaaattaccttggtcacagtggttaagccgtccaatctaagataaatattgtaccaaaaaaaattaaaaaataaaaacccacaaaaacacgtctgagcttctgtaatagcctctgagaagcaaggatgattctggcccctgcctcatgggccaggatcagaagtgacggtaaatggcagctggaacaaactcaggattacattttggggatttgtttgtttgcttgagacagagtcttgctctgttgcccaggctggagtgcagtggtacgacctcggcccactgcaacctccacctcctgggttcaagtgattctcctgtctcagcctcctgagtagctggaattacaggcgcccgccacaatgccagctaatttttgtatttttaatggagacagcgttttgccatgttgatcaggctggtctcgaactcctgatctcaagtgatctgcccgcctcagcctcccaaagtgttgggattacaggtgtgagccaccacccctggccaggattgcattttggaaagatcactgcttaattataacagttggccagacatgatggctcacacctgtaatcctgcattttgggaggctaaggaggaagaatcacttgaggtcaggagtttgagaccagcctaggcaacatagcaagaccccatctctacaaaacacacacacacaaaattaaccaagagtggtggggtgaagctgtggtcccagccactcaggaggcagaggcaggaggatcccttgagctcaggaggtggaaactgcagtgagctatgattacaccattgcactccagcctgggcaacagagtgagacactgtttcaaaaaaaaccaaaaaattgtaacagtaacacatacaccttgtaacaaattcaacagtattgacatctataaagtagcaaattataccaagatacacacacacacacacacacacacacacacacacacgcgcgcgcgcaaagtaacaaataagccggagcagtagctcatgcctgtaatctcagcactttgggaggcctaggcgggtggatcacctgaggtcgggaattcaagatcagcctgaccaacatggagaaaccctgtctctactaaaaaatacaaaattaaccaggcgtggtggcgcatgcctgtaatcccagctactcaggaggctgaggcaggagaatcgcttgaatctgggaggcagaggttgctgtgagctgagatcacgtcactgcactccagcctggacagcaagagggaaacttcttctcaaaaaaaaaaaaataagtaaaataacaaatgaaaggtgacaatttcaccaagtgcctctccccagaagtaacctcagttacttttttttttttttgagatagtctcccaaactggagtgcagtggcgtgatcacagctcactgcagcctccacttcccagacaagaacgattctcatgcctcagcctcccaaatagctgggattataggcatgcatcaccaggcctgactcattcttttgtattttttagtagaggtgggtttttgccatattggccaggctggtcttgaactcctgtcctcaagtgatctgcctgcccctacctaccaaagtgctgggattacaggcatgagccactgcactcagccctgtttacattttgtccagattcatttcactccgctaggcaggcagctggagccaaacaactgggtccctgccgtgtagcagttgcaagtggcggttgagggtgggccaaaggaggggttcctgtgccttgcctagcgctaatggcctgggttgcctgggggtgggtgttacttaactctccctcagaggggaactgggctcccctgcaactgtcacatcaggtctagcactctgctttcagtataagaaaaacaggccctgagatttttttttttttttttttcccctgaaacggagtctcattctgtttcccaggctggattgcagtggtgtgatctcggctcactgcaacctctgcctcctgggttcaagcgattctcctgcatcagcctcagtagctgggattacaggcacgtgccaccatacccagctaattttttgtatttttagtagggatggggtttcaccatgttggccaggctggtctccaactcctgacctcaagtgatctgcctgcctcagcctctcaaagtgctgggattacaggtgtgagccactgtgcccagccctgagataattctccttctagaagttttcttacacattactttcacagcattggtccagggaccaccactgcagccttgttggtaagagggaaacaattatttatttatttatgtattttgagaaagagtctcgctctgttgctcagtctggagtgcagtggcgtcatatcggctcactgcaacctccgcctcccgggttcaagcaattctctgcctcagcctcccaagtagctgggactacaagcacacgccaccatgcccagctaatttttgtatttttagtagagacggggtttcactatattggtcaggctggtctcaaactcctgacctcaggtgatccacctgcctcggcctctgaaagtgttgggattacaggtgtgagccaccatgcctggcctagaaggaaagatttaaaaagaccacggctgggtgcggtggctcacgcctgtaatcccagcactttgagaggccgaggtgggtggatcatgaggtcaggagttcaagaccagcttggcaaagatggcgaaaccccatctctactagaaatacaaaaattagctgggcatggtggcgtgtgcttgtagtcccagctacttgggaggctgaggcagagaattgcttgaacccgggaggcggaggttgcagtgagccaagatcgtgccactgcactccagcctggctgatggagtgagactccatctcaaaaaaaaaacctcaatgaggctgagcactttggcactttggctcacgcctgcaatcccagcactttgggaggttgaggcaggaggatcacctgaccctgtgaatttgaggctgcagtgagctatgatcctgccattgcactctagtctgagtgacagagcaagattctgtctctcaaaacaacccccaaaaccaataaaatcctgcaaggggcactagcaaggagccagtgacataaggcagaagcttcgtggctgtcaaaaagaagtgcgatctttttccttgttcctgggaatcctgcaaacatgtctgccccataggtaatgcgtagacaaggtcatttgttatgacattgaggattgcaaaattgttcgaagtgttacaggaaaggggtctcgatccagaccccaagagagcattcttggatcttatgcaagaaacaattcaggactgggcacagtggctcatgcctgtaatcccagcactttgggaggccaaggcaggtgaatcacctgaggtcaggagttcaagaccagcctgaccaacatggtgaaatgccgtctctactaaaaatacaaaattagccaggcatggtggtgggggcctgtaatcccagctacctgggaggctgaggcaggagaattgcttaatcggttgaacccaggagatggaggttgcagtgagccaacattacacccatgtactccagcctgggtgacagagtgagactccatctcaaaaaagaaaaaaaaaaaagtggagtgcagtaacgggaatgtgtgcagaactatgtgtatattgtgttgcttttggtgtaaaaaatgggaatgtgtttgcagtggcatgcccctgtaatctcatctactcgggaggctgagatggatcacttgagcccaggagctcaagaccagcctgggcaacatagcaaaactctgtctctgaaaaacagtctggaagcaatagctcatgcctgtaatcccaacactttcggaggctgaggcaggaggattgcttgagcccaggagtacaagaccggtttgggcaacagaacaagactcccatctctacaaaaaaaaaaaatctaaaaattagttaggagtggtggtgcgtgcctgtagtcctagctacttgagaggctagggtgggaggatttcttgagcccaggagtttgaggctgcagggagctatgattgcaccactgcactccagcctggacaatatagcaagacccctctccctaaagaaataataggccgggcacggcggctcacgcctgtaatcccaacactttgggaggctgaggcgggcaggtcatgaggtcaggagattgggaccatcctggccaacatggtgaaaccccatctctactaaaaatacaaaaattgccaggcgcggtggctcactcctgtaatcccagcactttgggaggctgaggcaggcggatcacgaggtcaggagattgagaccatcctggctaacacgatgaaaccccatctctatttaaaaatacaaaaaacgagccgggtgtggtggcagacgcctgtaatcccagctacttgggaggctgaggcaggagaatggtgtgaacccgggaggcagagcttgcagtgagccgagatcacgccgctgcactccagcctgggcgacagagcaagactccatctcaaaaaaaaaaaaaaaaaaaaaaaaaattagctgggcgtggtggcgcgtgcctataatcccagctactcaggaggctgagccaggagaattgcttgaatctgggagttggaggtttcagcgagccgagctcacgccactgcactccagcctggtgacagagtgagactccatctcaaaaaaaaaaaaaaagaaaaaaaaaagaaaataataaagggaatgttttgattatggaggcatagactatatagagaaagaaaatgattaatattagttgcccctggggtggaggaagacttgctttatgttgtacccttctttctgcttggattttattgaattaattttttttttgagacagagtcttgctctatcacccaggctggagtgcagtggcacaatctcagctcactgcaatctccgccctcacctctccaccccctttacccgcaaaccccctaggctcaagtgattctctcgcctcagcctcccaagtagctgggattacagtcatgtgtcaccacgcctagataagttttgtatttttagtagagatggggtttcaccatgatggccaggctggtcttgaacttctgacctcaagtgatccgaccacctaggccttgcaaagtgctggcattacaggtgtgagccatcgtgcctggcctattttatttacttattttttttgagacagattcttgctctgtcacccaggctggagtacagtggcacaatctcagctcattgcaacctccgcctcctgggttcaagcaattctcctgcctcagcctcctgagtagctaggaccataggctcctgccaccacaactggccaatttttttttttcaggcagagtttaactcttgttgcccaggctggagtgcagtggcgcaatcttgactcactgcagcctccacctcccagatgcaagtgattctcctgcctcagactcccaagtagctgggattacaggcactcgccagcaagcctgactaactttttgtatttttagtggacatggggtttcactatgctggccaggctgatcttgaactcctgacctcaaataatccacccgctttggcctcccaaagtgctgggattacagatgtgaaccactgagcctggcctctgcttggattttattttttttttattttttatttttttgagatggagtctcgctctttcacccaggcaggagtgcagtggcgctatcttggctcactgcaagctccgcctcctgggttcacactattctcctgcctcagcctcccaagtagctgggactacaggcacccgccgccacgcctggctaatttttttgtagttttagtagagacggggtttcaccatgttagtcaggatggtctcgatctcctgacctcgtgatccgcccacctcggcctcccaaagtgctgggattacaggtgtgagccaccgtgcctggccgggttttataatcacatccatggataaggcaacttggtcatggatggggtaagagatggaggcaaggaacagcagctcaggggagcccagccactctaaccaggagaacataacacaccagtggcactggttcagccttggcaactattcttttattgaacatcagtaacagaaagatgcttgatttaggaggaagctttccctccctccctcccccattgcaccccggaactcagcaaaggtgagccagccacagagcataacactgtggctgggacacatgtccatgtgtgtttcacatacgtgggcatctgtgccacaagggtcatgtggcaccacagttcatcagctgtgtttccccttcctgccctgctgcagcgccacaggttggaggaaaagcctgcctgtgagcagggtcccggcagggcccacccacccaacagtggagatcgggcctcagagctgggcagtcatgggagttcagggcctggctcgcctcggcagcctggtcttaaagagggacttgcccgaggcctcgatgtaagtgacagtcatctctttggagctgatctccacataggcaaagccacccagtgagtcttcagtcccatagtggaagcgcagatagccgttggggaccttgcgctggtgccgctttgaggggtccatgaaattcccagccccactcagcacgtagcccacgccattctcatcttgcaggtactgaggatggaggacaaggggtcagtggagacccagctttgagcagagccctgcctaaggtccagggctcgatctggccctaaccacagagtcaccttgaggtatgtaacccctcctggcttcaatttcctgacttttaggagtgtattaatcctatttcataggtagagcacttagtaagaaattggtggccaggtgtggtggctcatgcctgtaatcccagcactttgggaggctgagggggtggattgcttgagcccaggaatttgagaccagcctgggcaacatagtgagaccttgcctctacaaaaaaaatgcgcaagggccaggtgcagtggctcatgcctataatcccagcactttgggaggccgaggcgggcagatcacttgaggtcagaagttcgagatcagcctggccaacatggtgaaaccccgtctctactaaaatataaaaattagcaaggtttggtggcccatgcttgtaatcccagctacttgggaggctgagacaggagaattgcttgaacccaggaggcggaggttgcagtgagttgagatcgtgccactgcactccctctcaaaaaaaaaaaaaaaagcaaaaattagctgcatgtggtggcccatgcctgtagtgtcagctactctggaggctgaagtgggaggttcacctgagcccgggagattgaagctgcagtaagccccgattgcaccactgcactccagcctgggtgaaaaacaatgaaaccttgtctccaaaaaaaaaaaaaaaaaagagcttaaaaaagaaagaaagaaagaaattggcaattcgaagatattattctggctttggagtgttttcctggttagacagcaagatttgagggacagtctagacattctgaaggccacaggagaccctcaaacagcaggaggaccccagccatgtggacatcagctgggatggggacccccctcacccagctcccaccccacccacagggccctcacctgcagattgtgatcgtggccgcacaggtaggcagtgaccccgtatgtggccagcagtggccgtagctgcttgaccaggcagtgggtaggcccgtgctcggctatggaccacacggggtagtggccagccaccagcacgtagtcctccctggccgccgccagctgtttcttgagccaggacagctgtgtgcgggccagcttcacgtctcggggcctctcaggctgctggctgaggaagtcatctgagttgccacatagtgtcactgtgtccagcataaaaatggccacagacacattggtctgtgggatcttgaagtgcaggcggtagaaagggctggggaagttcctgtggaggggatagaggtcgtgggtgcacatcttgggcgcagaagtcccagggtcagctcaagccacagggcccctgtgtccctgctatgtgaggatctcggaaggcagggctgagggtggctcaccagcgcttggagatcttagagtatgcaatctgggcagagacattgccaaggtggtcatggtttccggctagcacgtaccagggcactttgcgaagggagcggtcagagaatacgtcctcaaaggtctcctgtagcaaacagatagggcaggcctcttccctggggtcagtggctatgccgatcctcccaccaagtcaggataagggagacactgaatgctcccggcgcccaaaggtgccccatcaccttccctctgccctcaccaaaggaaggtcactaggtaaggcggcttctccccactgcccgcccccacctcctgccccactctgttgggcacagacctggaacctcttgtcattgatgtcttgcacaccagtgaagtaaaaattgtcccctagagacaggatgaagtctgcacccaggatctgcacagtccgagcgatctccttggcattggccatttcccgggccgtgtggaatggggcattggggacccctccccagtcacccacggctacaaagcgcagggcaggggtggcaccatcagccagggagggtagcaacaaggcttgcaggatgagcagcgccgtccacatgtccatctgggagaagagagacaagcataggtggcccgggctgtgacaagggcagggaggccttgagacccccgcctgccctgagatagagggagactgcttgctgcaggctgcccctgcgggaaccccttggtgccctaattctcaggacacacaagctgcacaaggctgcacaagctggcttagggaaggggggcgcggtctgtgagagggcgagctgtaccaagatggccctgcaggcccatttcaccctccttccacctagcctgcccagcactcacccagggggagacacaggccagtcaccggaggctctgagaggctggtgggctctagagtagaactgccggtccctgagcctttattccctgaggaggaagtggatcattagtgaggatgatgcagtttctccgagggctgtcccgggagccctccccttgggtcatgtgagccctggacttccctggagcaggacacgggattggggtgggggtgggaggatctgggcacacgtgtgcagcagcctcggcccacacagcctccgggtggacctgcaggggcctgtttgtgctgtaggcttgacacgtccaggtatctctgtgtgtctgtgtatctcagtgtgagtgtgtgtgtgtgtgcacacttgagaggctgtggctgtgattacccaagacacatctcctgcaccttctttctctgagtaagggcttacctgtgtgtgtctgggtgtgtcttgcttcctgcgtgcagctgagcatgcctacctgggcctcggctctgtacctgatggtgttgctgcagacatgtatgctgagcctgcgaggcctgtgtggcttgtctgcgatgcacgcctgtgttctcacgtggcactgggtgggaatccctatggatggagttttgtgtgtgtccatgtgtgtgtgcctgggttgcatctctaggatgggttgcgtgtctggtgtgggagctgtgtttgacaacatctgggtgggggactccgcgtgtgtccccgtcctccccctgccctctctccatcccacacataaacaccaacgggcttcccttttccaggaagtcctgcccacaccctcccctccccccagactcccattcctgcaggaggaaccaggcaggaggcagctagctggtgatagcgcgcgtgaccacagacctctgaccctcatagtctcagcagctgtctgcaggccctccacgggaccgcagcctgggagggcaggaggccctgcacctgcggccggtctgacctgctcctcacctccctgcctgcctcctccgtgctgggcgccgccgcgacacgtcccgcggacattcaggagtcccttcagtccctgcgagcgcggacccgggagagagctctcattcaacgctgaggccactggctcacagatctccccgggtcaccctgcgaagtgcttggtcccccccattcccagccctgcagcagcaacaaacgggaaggaagtgggtgacgaggacaggcagagacccctcccacggggccgcccgcatctcacctgccgtcgcggggcgggcgttgcggccggtgcccagctgcagatccgcaggcgatcgcactcctggcggccccagctttaagcaggcagcggccgatccgccctgctcgagggctcagggctgacccaggtgagccccggcggggagggcgggcgcctcggcctccccgccccggaaccctgcaccgcccagagccgccacgcctcccggctgtaggctccgcatctgtaaaatgggccgatgaaccccaagggtcggctcagacccacggactgcagctgcagctgggctagaaggggtggccaggggagccgatttcatccttttccttcctccacgccaaccaggagcctccatctgcctgggaccctttgggggcacccatgggcccacagccgcagaaccacagcactgggtggggtttcagccctggggccaagctcttgtgaggtctgtcatcatcttctcctgttgttttgtttttttgtttgtttgtttgtttggtttttttttttttgagacagagtctcgctctttcacccaggccggactgcagtggcgcgatctcggctcactgcaagctctgcctcccgggttctcgccattctcctgcctcagcacccccgagtagctgggactacgggcgccgccaccgcgcccggctaattttttgtattttttagtagagacggggtttcaccgtgttagccaggatggtttcgatctcctgacctcgtgatccacccaccttggccttccaaagtgctgggattacaggcgtgagccaccgcgcccggcctgtttttgttttttttttttttgagacagttttattctggttgcccaggctggagtgcagtggcgcaatcttggctcacgcaacctccgcctcccgggtacaagcgattctcctgcctcagcctccctagtagctgtgattacaggcacgcaccaccacgcccggctaattttgtatttttagtagagacggggtttctccatgttggccaggctggtctccaatgcccgatctcaggtgatctgcccacctcagcctcccaaagttctgcgattacaggcgtgagtcaccatgcctggccagtctcctgtttttttaaaaacttattatttagccggtgtggtgtctcacacctgtaatcctggcactttgggaggccgaggtgagcggatcacttgaggtcaggtgttccagaccagcctgggcaacatggcaaaaccttgtctctactaaaaagacaaaaattagctggaggtgctctcttgaacccaggaggcagaggttgcagtgaactgagatcatgccactgcactccaacccaggaggaggaggttgcactgagccaatatcatgccactacattccagcctgggcgacagagcaagactctgtcccccccaaaaaaaaaacagaaaaaaaaaaaaagaaagaaatctgaagcaattatgaccaaatgttaacatctgtttcttcacgtggtgggtacaggcgtgttttggaagcttctatgcttcctgtattttgagatcacacaaaattatgtttattatcttattgtgctacatgatctttgtagaaaagttggtaaattctggaatgcacgaagaaaaagattataatagccagtaatacccctgcccagagagacagtatccattaatttttctctgcctatgtttgtcttcggaaaaatgggatactattggcactattttataactttttaatttgtattaacactttctatattttttaaattgaaaaagctggccaagcatggtggctcaggcctgtaaacccagccaatgtgggaggatcgcttgagcccgggagttcaggaacagcctgggcatcgtggcgagaccacattgctacaaaaaaaaaaaaaaaaaaaaaaaaaattagccaggcatggtggtgcacacctgtggttccatctactcaggaagctgaggtggaggatcgcttgagcctgggagtttgaggctgcaataagctacgaatgcaccactgaccttcagcctgggcaacacagctagactcttgtctcagagagagagagagagagagagagagagcacaatgaaaaaaataaacctgatcttgcacagagcatgtaataaaacctgtgcgttcttggctatctctctctggtctcctccagggtgctgaataagctcttctctctccattcacccaggagaactctcttctgctgattttctgtggagctagatcaggctgtgactcagaatctccctccacctccaccctttcctattttcccaacaccagtgtcaatctcagatgtcaacaaccccacgagtgagttcctcctgttgccaatacatccaggtcctgttctccgctgctgtctctacccaatcccttcccttccttcctcctgccaatcctgctttccctgtttcttgctcctctgacctcctccgcattgcttgactgtctcagatacactctggcctcagggtcttggcactttctgttctccctgcctggaagggtcttccttagtcagatactgaggtcacccattgtgttcaagttcctttaatttatctgaaatgagtctgggcgtggtggctcacgcctgtaatcccagcactttgggaagccaagccgggtggatcacttgaggccaggagttcgagaccagcctggccaacatggtgaaaccccatctctactaaaaatacagaaattagctgggcgtggtggcacaaacctgtggtcccagctactcaggaggtcgaggcaggagaattgcttgaacctgggaggcggaggttgcagtgagccaagatcgtgccactgtactctagcctgggtgacagagtgagactctgtctcaaaaaaaaaaaaaaaaaaagaaaaagataatttatctgaaattatctgaaatgcaccaccctgcccccatcattgactctcctgttgctgtagttttctctgcagcacttaccagtgcttgagaaaaccacccactcatttatcttgctttcagtttctcttgctttcagtctgtcttcagttaatgaaagctttttttttctttcttttttctttttctaaaacagagtcacccaggctggagaccagtgatgcgatcacggctcactgcagactcgaccttctgggctcaggggatcctcccacaccccttggcctcctggggattgagactacaggcacacaccaccacacccagctaatttttgtattttttgtagagagagggatttgtcaccttgtccaggctgctcttgaactcctgagttcaagcaatcctcccaactcagcccctcaaagtgctgggattacaggtgtgaaccactgcccctggcctgtttatttaaaaaattaacattcattctcagtttattggctaagtttagaagtagtatcagaatgtttaagagaacttactgttctccttttatttgtatgtttgcattgtagatttttaataactgataaggacttctcaaggtgtttgcttggtggagacatttaaaaagattaaagaataggccaggtgcagtggctcatgcctgtaatcccagcactttgggaggccgaggcgggtggatcaagaggtcaggagatcgagaccatcctggctaacatggtgaaaccccatctctactataaatacaaaaaattacctgggtgtggtggcacgtgcctgtagtcccagctactcaggaggctgaggcaggagaatcgcttgaacccgggaggcagaggttgcagtgagctgagatcgcaccattgcactctagcctgggtggtagagcaagactctgtctcaaaaaataataataataaattaaaagattaaagaataagctggcacagtggctcacacctgtcatcccaacactttttgtagagacctcatctcttaaaaataaaattagctgggcgtggttgtgtgcacctgtagcccagctactcaggaggctgaggtgggagcattgctcaggaggtcgaggctgcagtgagccatgattgcaccactgcactccagtctgggtgacagagctgatacactgtctctaaaaaataataataattgaccgggcgcagtggctcacgcctgtaatcccatcactttgggaggccgaggcgggcggatcacgaggtcaggagatcgagagcaacatggctaacacggtgaaaccccgtctctactaaaaatacaaaaaaattagctgggcgtggtggtgggcgcctgtagtcccagctactcgggaggctgaggcaggagaatggcatgaacctgggaggtggagcttgcagtgagccaagatcgcgccactgcactccatccggcttgggtgacagagcgagactccatctcaaaaaaaaaattaataataataattattattatagtagtaaaagagtatagaataaaatgcatcacacttataaaatgtaaaatgttaatttcaatccactaaacttataaacggacccaaatatgcatccaatgacctcttaaagtgatatttctttttctttttgttgagatggagtctcactcactctgtcacccaagctggagcgcagtggtgtgatcttcagctcgtcccaacctccgtctcccaggttcaagcgattctcctgacctcaagtgatccgtctgccttggcatcccaaagtgctgggattacaggcctgaggccaggccctgaattaattttttgatgtttcactttgccaggtgtataagtaacatgttagttgtgattgtaactaaataaaggcttaagggaaaccgtgtttctaaatttctaaattgactacacatttacaaaggaacccacaaagatggatttttgggccgggcgcagtggctcacgcctgtaatcccagcactttgggaggctgaggcagacagattgcctgagttcaggagttcaagatcagcctaggcaacaaggtgaaaccctttctctactaaaatacaaaaaaattagctgggcatggcagcgagcacctgtaatcccagctacttgggaggctgaggccggagaattgcttgaaccagggaggcagaggttgcagtgagtcgagatcacaccaccgcactccagcctgggcaacacagtgagactcgatcttaaaaaaaaaaaaaaaagatggactttttcggggccccaaggcttcaaaattcaaaatgctgtcatgagttagtttgatttgaggaaccaaaaattggcttttgtggctggagcagagtgagcaagggggaagtgaatccggaaggttgagtctgcaaggtcaagggcaaggaacagagaagggtgtgggtggggcaggttgcgtgtgctcttgggggctgcagggaagggggcttttatctgggtaaggtgggagccacagagggttctgatcagagggacagatctgacttagattttgcatgatgtcccccagctgtgggctgcggggcatgggctgctgaataggtggtttaggtgggcaaagatgggtcatggtgccccctaccctttaaaaattaaaagacagggccaggagcagtggctcacgcctgtaatcccagcactttgggaggctgaggtgggcggatcacctgaggtcaggtgtttgagaccagcctgaccaacaaggtgaaaccccatctctactaaaaatacaaaaaaaattagctgggcgtggtggcagccacctgtaatcccagctactcgggaggctgaggcaggagaatcgcttgaacccgggaagcagaggttgcagtgagccaagatcgtgccactgcactccagcctgggcgacaagagcaagactgtctcaaataataataataggccgggtgtggtggctcacacctgtaatcccagcactttgggaggttgaggtgggtggatcactggagcccaggagtttgagacaagcctgggtgacacagtgagaccccatctaaattattattattattattatttgagacagagtcttgctccatcacccaggctggagtgcagtggcgcgatcttggctcactgcaagctccgcctcccgggttcacgccattctcctgcctcagcctcccaagtagctgggactacaggtgcccgccaccacgcccagctaattttttgtattttttagtagagacggggtttcaccatgttagtaaggatggtctggatctcctgaccttgtgatccgcctgccttggcctcccaaggtgctgggattacaggcgtgagccaccatgcccagcctgaattttttttcttaaagattaaaaaggcagagcctctctgctcctcccatttgacagacagccacatcttttcatgcagtgaaaaaggcatgtccccgagacaccgtggtgaaagtgaagacaggagtaaatggatttggccatattgggtgcctggtcaccagggcaccagagctgcttttaactctggcagaatggatgttgtcacctcaatgaccccttcattgacctcaactacatggtctacatgttccaatatgattctacccacggcaagttccgcggcaccatcaaagctgagaagtgggctgggtgtggtggctcatgcttgtaatctcagctacttaggaggttgaggtgggaggatcacttgagaccaggagttcaggaccagcctaggcaacatagggagatcctctctctcttaaaaaaaaaaaaaaagaaaagaaaagactgagaaagagaagggaagcttgtcatcaataggaaatgggaatctcatccccatcttctagaagccagatcccagcaaaatcaaattgggtgacgatgctggcactggttatgtcatggagtccaccagcagcatcttcacgaccatggggaaggctggggctcgcttaggatgggcagccaaagggatcaccatctctgccccctctgcccatgcccccatgtttgtgatggacatgaaccatgagagatacaaaaacctcatgatcgtcagcaatgcctcctgcaccaccaactgcttaccctccggccaaggtcatccgtgacaacgtttttttttggtttggtttggttttctttctttcttttttctttttttgttttaaatagggatggaggccaggtgcagtgactcatgcctgtaatcccaacactttgggaagctgcggttggaggatcacttgagcctaggagttcaagaccagcctggccaacatagcaagactctgtctctacaaaaagtttaaaaaaattatccaggcatggtggggtgtatctgtagtcccagctatttgagaggctgaggtgggagggttgcttgagcttgggaggttgaggctgcagtgagccgggtgacggagtaagaccctatttcataaataaataaatagagacgggggtctcactttgttgcccaggctggtcttaaactcctgggctcaagtgatcctcccactttggcttcccaaaatgctgagattacaggctgagccactgaccctggtcatccatgacatctttggcaacatggaggggctcatgaccacagcccctctgggaaactggcgtgacaaacatcatccctgcatctactggcacggccaaggctgtgggcaaattcctgcactgaacaggaagctcactggcacagccttccgagtccctgccaccaatgtgttggtggttgacccgacctgccatctggagaaacctgccaaatatgatgacctcaagaaggtggtgaaacaggcattgggggggccccctcaagggcatcccgggctacattgagaacaaggttatatcctccgcctttgtttttaaattatatttatttatttttttgatagggagtctcgttctgtctcccaggctggagtgcagtggcgcgatcttggctcactgcaacctccacctcctgggttcaagcaatcaattctcctgcctcagtctcccgagtagctgggattacaggcgcacaccgccacacccagctaattttttgtatttttagtagggatggggtttcaccatgttggccaggctggtctcaaaatcctgaactcaagtgatccacccgcctcagcctccgaaagtgctgggattacaggcctgagccaccgtgcctggccgtctcctctgacttttaacagcgacacccatccttccaccttctgtgctggggctagcattgcccttgatgacactttgtcaagttcatttcctggcatgacaatgtatttggcttcagcaaaaaggtggtggtccacactgtctccaaggagtaagaccctcagaccaggagccccagtgacagtatgagaggaagagagaggccctcagctgcttgggagtccctgctgcactcagccccccaccacactgaaaatctccccatacacagtttccatgccagaccccctgaagaacagggcctatcaataaagcagtaaggtcctctgtacttagaccaaaaacaaaaaaaaacaaaaaaaaaacaaaaaatgaaaattactcttgcctgtaatcccagcatttagggaggctcaggtgggaagattgcttgagcctaggagtttgagaccaacctgggcaatatggtgagactttgtctccaatatagatagatgatagacggatggatagaagatagacagattagacagagagagagagagaaaggagagagagagagagagagaaaagaggggaggggaggggaggggaggggaggggaggggaggggaggagaggagaggagaggagaggagaggagaggagaggagaggagaggagaggagaggagagagaaattaggcagaggagaggagagagaaattaggcagatgccttgggcagtgaagtccctggggatggtctactgttcccgcagcctgagcgcctttttcagacgtttttatctgtccactgctgcccctgcatggccacagcctgaactgcagcaccgaacgcagacccagtttcccttttggagaagaaattaatgctccttccagccccccacttgccactaggcctgtgcagggcgtggacagattctacagtggatccagccagagactgccccagagaaaattccaggggtgggatgagtgaggtatgctgggactggaatgtttgtaggataacatgatgagcagccggattcccaggaaattgcaaaccgtgtctgctctggtgagattctcagaggaggggatctataggcagttctgagtaggcactgggtaaaagcctggaaagaggaccctggcttggatggggctctgcctcactcgccatgagctccttggcgctatcagtcagcacagttcagctgcatgggtgtgaaggtgtcctggtgactggctacccccatgcctgcctcagtgcacgggaggtggaattatggatttggtggggctcgcacaggctaagggactgattttcagtctggagaatgggagggcaggatgagctgtggagggtcaggctggtggtttggagggtggcatgatgtaaatgtagctgttcactgttgtagtttgctgccaccagttcagtctggctaggttccaggtgggtcaataatctcaaatggggctgggctcagtggctcacacctgtaatcccagcacttcgggaggccgaggcgggtggatcacttgaggccaggagttcgagactagcctgcctaacatggtgaaacctcgtctataccaaaatataaaaaattagccaggtgtggtggcgggcgcctgtaagcccagctactcgggagactgaggcaggagaatgcttgaacccagggggtggaggttgcagtgagccaagatcgtgccactgcactccagcctgggcgacagagcgagattccaccaaaacaaacaaacaaacaaaatcccaaatcgggagaggtgaggtggggtctgtcatgccaaggagttggtttctttcttttttttttttttttttgagatggagtctcagtctgtcacccaggctggagtgcagtggcgctatctcggctcactgcaagctccgcctcccgggttcacgccattctcctgcctcagcctcccaagtagctgggactacaggtgcccgccaccacgcccggctaattttttgtatttttagtagagacgggatttcaccgtgttagccaggttgctctcgatctcctgacctcttgatccgcccgcctcggcctcccaaagtgctgggattacaggcgtgagccaccgcgcccggccaggagttggtctttatattacctaactcccacctctttcctcaatgatttgaacgtttgatcatttgaatgtttgaatgtttgatcctcgtgatcaaacattcccgttactctctagaccccatcatgctcccccaacccctccccacatcctctcagatatccaccagctctagcccccagagtaaaaacatccatcgtctccaccatcaagtgaaagcaaatggtgacttccttgcctcagccattgctgagccagttggatggcaaggaggaaaaccccacccaagccccacctaacccctgtcctccttttcatcccagccggtgcccactgattccatggttacctgacttatccactccagctcctggtccttctatcctgggtaccgctgaactgcttgggagtagcaggctgagaagttctggtgcccctcctgcagcaaggctgtcagcgggcacgggaggatgcggggaccggctggagtaagccatagccagggcaggaaggagccccacacagatctccctcagctgtgaactccacaacgacccacctcacagtcaacaacaccaatggacactcgttcctctaatcccgttattactaggcacccatttctctccacccaaggttttgttcaccatcctcaattatttattatttttttgagatggagtccaggctgaagtgcagtaacgcaatttcggctcactgtagcctctgcctcccgggttcaagcgattcccctgtctcagtctcccaagtagctgggattacaggcccccggcaccacgcccagctactttttgtatttttagtagagacggggtttccccatgtttgccaggctggtctcaaactcttgacttcaggtcatctgcctgcttcggcctcccaaagtgctgggattacagacgtgagccaccacgcccagccggtacccccaattatttcagtattcatgatccgcaggaaggaatacatatgttttgttgttgttgttgttgttttgttttgtttcttttgtatttttagtagagatgggattttgccatgttggccaggctggtctcaaactcctgacctcaggtgatcctcctgcctcggcctcccaaagtgctgggattacagttgtaagccaccatgccaggccatgaatacatatgttttattgagttctttttttttttttttttttttttttgagatagggtctcactctgttgcccaggctagactgcagtggcaccatctgctcactgtgacctcgacctctcaagctcaagcgatcctcctacctcagcctccccagtagctgggactataggcgtgcaccaccatacctagctaatttttgtattttttgtagagacagggtttggccatgttgcccaggcttcttctttttcaatgaatgtatttacagctataaatttttccttctagcactgctttctctgcattccatacattttgatatgttggattttcatatttgtctcaaggttgtttttattttttattttatttatttttatttttatttttttgagacaatttccctcttgttgcccagtctggaatgtaatggcatagtcttcgctcactgcaacctccgcctcctgggttcaagcgattctcctgcctcagcctcccgagtagctgggattacaggtgcccgccaccacaccgggctaatttttgtatcttttgtagagatggggtttcaccatgttggccacgctggtctcaaactcctgacctcaggtatcagcctcccaaagtgctgggattacaggcatgagccaatgtgccccgcctcaatagcctcaagcaatcttgtcacttcaatcccctaaactgggactacagggaggcaccactgtgtctggcttggatcatattttaaacatctattctgcctatctctgttttttgattggaaagtttaacccatttcaatttaaaggaattcctgaggtggaaggcccaacttcagccattttaccatttgtgttctgtgtgtcttggagcttttttgttctttatttcttccattactgccttcttttctgtttacttgactttttgtaatgagactttttgattctcttatttcctttcgtgtattttctatagatattttctttatggttactatggggattacatttgacattctaagttataataatataactttattttattttattttgagacagagccttatctgtcacccaggctggagtgcagtggtgtgatcatggctcactgcagcatcaacctcctgggctcaagcaatcctctcacctcagcctcccgagtatgtgggactataggtaagggccaccatccctggctaatttttaaaaaaaatttttgtacagacaaggtcttactatgttgcctgagctcttgaactgctgagctcgagtgatcctctcgcctcagcctcccaaagtgctgggattacagacatgggccactgttcccagcaaaggtttaaatgatacctatttaacttcaatagcatagaaatattctattctattaattgagaactagtcttgctatgttgcccaagcttagatttgaactcctgggctcaagtaatcctcctgtttcagcctcccaagtagctgagactacatgcatgtgccattatgcctggttatggtataaacatactctatttccttttttcttttctttttttttttttttttttttgagacggagtttcgctcttgttgctcaggctggagtgcagtggtgtgatctcggctcaccgcaacctctgcctcctgggttcaagcgattctcctgcctcagcctcctgagtagctgggattacaggtgtgcgccattacgcctggctaattttgtatttttagtagagacagggtttctccatgttggtcaggctggtctcaaactcccgacctcaggcaatccgcctacctcggcctcccaaagtgctggaattacaggcgtgagccaccacgcctggcccagatactctatttttatagtttcctcttcttttatgttattttttaaaatttttatttacttatttatttgaggtaggatctcactctgtgacctaatctggagtgcagtggcgtgatcacggcttactgtagcctggaccttccgggctcaaacaatccttccacctcagcctcccaagtagttaggaccataggtgcccaccaccatgactggctaatttgttaatttttccatagagataaggtctcactatgttgcccaggctggtcttgaactcctgagctcaagcgatcctcttgcctggactcccaaagtgctaggattactggcgtgagccaccgcccccggctcttttatgttgttaatgtcacaaatcacatctttatatattgagtgcccaatatcatagaaatataattatttttattacttttcttgagaaagcatctcgctcttgttgcccaggctggagtgcagtggcgtgatctcagctcactgcaacctccacctcccgagttcgagcgattctcctgcctcagcctcccaagtagctgggattacaggcatgtaccaccatgcacagctaattttgtatttttagtagagacagggtttctccatgttggtcaggctggtccggaactcccaacctcaggtgacctgcctgcctcggcctcccaaagtgctgggattacaggcatgagccaccatccccggctttctttttttctttttgagacagagtctcgctctgtcacccaggctggagtgcagtggtgcgatctcagctcactgcaacctccgtctcccaggatcaagcaattctcctgcctcagcctcctgagtagctgggattacaggcatgctccaccacatgcggctaattttagtatttttagtagagatggggtttcaccatattggccaggctggtcttgaactcctgacctcaaatgatccacacacctcggcctcccaaagtgctgggattataagcatgaggcaccgtgcctggccggtcttttcttaattctttttttctgggcctctgtggtaactgtaatttcctctgtggctgcctttgaatgacctaattgtcaatgtctgggtcccaagagaaaaataaaataacaaaagtgcaaaaagaaaataaaatttcggctgagcgaggtagctcttgcctataatcccagcactttgaggggctgaggtgcgaaaatcgcttgagttcaggagtcctagaccagcctgggcaacatagcgagacattgtctctactaaacctaaaaaaatattatccgcgtatggtggcacttgcctgtggtcccagttactcgggaggctgaggtggggggattgcttgatcccaggagatcgatgctgcagtgagctataatagcaccactgcacgctatcctgggtgacagagcaagaccttgtcttaaaaaaaaaaaaaaaaaagaaaaaaatcaataccttccaaattcattatgcgaaggggaaaattaagcacttaagtcctagaaactgagtcttataatacagcttctctgatgcatgactgatgcttccttacctttgttttgagactgtagccatcagactccttgttcttcattcaaacctatactaaatgatgtaggatatgtatacccttgcgactgttaccgctttacaatagaatgttaagcaacccccatagagtgtaatcaacagtagtcaatcacatctgtttttttttttattttaatttttttttttattttgagacagagtcttgctctgtcacccaggctggagtgcagtggcatgatcttggctcactgcaacatctacttcctggattcaagccattctcgtgcctcagcctcctgagtagctgggattacaggcatgtgtcactatgcccagctactttttgtatttttaatagagacagattttcactatgttggccaggttggtcttgaacccctgacgtcaggtgatccacctacctaggtcttccaaagtgttgggattacaggtgtgatccacggcacccagcctcaaatcttatgtctgtatattaacatctgtatggaaatgtatttctgttcagcacctctgtttttgcctatatagacaattttcacttttccccacactgggatcattgatcactattcttcggtgtcagcatgtccctgatggccacccttgtactctgtgtttgaataaactcttttttttttttttttttgagacaaggtctctgtcatctaggctggagtgcagtggtgccatcatagcttactgcaacctcgatttcctgagatcaagtgatcctcccgtcctagccccccgagtagctgggactacaggtgcaccctatcatgcccagcttattaaaaacaatatatttttttgagagacagggtctcactatatggtccaggcgggtctcaaactcctgtgctcaagccgtcctccagccttgacctcccaaaatgctgggattatagatatgagccactgtgcctggccttgaataaactattttaactggatcttgagcctttcgattattttaggttgacaaagggaaaaaaataaaaggcatcagctctttatatcccccaccacgcctggctaattttttgtagttttagtagagacggggcttcaccgtgttagccaggatggtctcaatctcctgacctcctgatccgcctgcctcggcctcccaaagtgctgggattacaggcatgagtcactgcacccggccaatttttgtatttttttgtagagatggggtgggagggtttactatgtggcccagactggtttcaaactgctaggctcaagcaatcctcccgtcttggcctcccaaagtgctaggattggaggcatgagccactgtgctcagcccctggctaattttcatattttttaaatggggttaggggttggtctcactatgttgcccaggctggtttcaaactcccgggctcaactgatcctcctgccttgacctcctaaactgctgggattacaggcatgagccaccatgcctggccatagattctttatgatttttattctgccatcttccctgaatcctccaacctgccttttttttttttttcaggcaaagtcttgctctgtcgcccaggctgatgtgcagtggcacgatctcagctcactgcaacctccacctcccaggttcaataattttttgtatttttagtagagacggggtttcactatattggccaggctggtctcaaactcctgacctcgttatcctcctgcctcagcctcccaaagtgctgggattacaggcatgagccactgtgcccagcttaacctgcctttttttttgagacagtttctctcttgttgaccaggctaaagtgcaatggtgtgatcttggctcaccgcaacctccacctccccgattcaagcgattctcctgcctcagcctcccgagtagctgggattacaggcatgtgccaccaggcccggctaattttgtatttttatttatttatttattttattttatttatttatttatttttgagacggaatctcgctctctctcccagtctggagcgcagtggcgccatctcggctcactacaagttccgcctcccaggttcacgccattctcctgcctcagcctcccgagtagctgggactacaggcgcccactgccacgcccggctaattttttgtatttttagtagagatggggtttcaccgtgttagccaggatggtctcgatctccagacctcgtgatctgcccgcctcggcctcccaaagtgctgggattacaggcatgagccacggcgcctggcctaattttgtatttttagtagagatggggtttctccatgttccgaactcccgacctcaggtgatccgcctgcctcggcctcccaaagtgctagattacaggcgtgctccatcgcacccagcccaacctgccttttaatactaatacattactttgggtctcatcccacatcacttcatcagagagcatccttcctctcacctcagttatttctacttttttttccacgtatagatgttttttcagggaccggagggtatgggaggaagccttggcacgcctcatcccaaatgcccgtttcccggaacatcaggcccttcctcctcttcctgtcctccctggcctagcctgggctccctcccgttctgaggcaaggcgattgctccatgtcacagtgagtgtggagttccctgcacatactggtgaccttgtgtccggaaggaattagaaggaagagctcatggagtgccagaagaagacagtgcctactctggcaagctagaagcaagctctgcattaaatgcaaatattggccgggcacggtggctcacatttgtaatcccagcacctggggaggcctaggcaggaggatcacttgagcccaggaattcacgaccagcctggtcaacatagtgagaccccatctaacccaccccacccccgtcacacacacagcaccaacaacaaaataaaattagcagagtgtggtggggcgtgactttggtcccagctactagggaggctgaggcaggaggatcgtttgagcccgggagattggggctggagtgagccgagatcatgccactgcagtccagcctgggtgacagagcaagaccctgaaagaaaaaaaagaaaggagggagggagggaggatggaaggaaggaaggaaggaaggaaggaaggaaggaaggaaggaaggaaaccaaaacaaggccacgcgtggtggctcacgcctgtaatcccagcactttgggaggctgaggtgggcgtatcacttgaggtcaggagttagagaccagcctcggtaacatggcgaaaccccgtctctacgaaaaatacaaaaattagccaggcgtggtggcgggtgcctgtaattcagctactcgggaggctgaggcacgagaatcgcttgaacccgggaggcagagattgcagtgagctgagatcgcgccactgcactccagcctgggcgacaaaagcgaaactccgtctcaaaaaaaaaaaaaaaaaaaaaccaaaacaaaccctcaaatatccctcgggctgggtgcagggaggaaactcggcctgagaggcgcagtggctagaaccagtcaacactgctacgcacagccacgtttccatggcttcctacgtcactcaggccttagggggcggggtatgtcaccctatccaatcaggggcgctggggcggggccctgccaactgtccattcagatgggcccgggagaggagggcagggcctgcgcctccctacggagcctttgtttctggcgaccgtccccacccgggctcgcgtctccgtttctccgagaggcccaaggtgtctccgccgcagcctctgtcgcgccgtgacctgtacaggtcgcgggagtcgtagggaggacgccgggacacctggaagccgagaaatggtgcgtgtgaggggtcaggcgtccccagacctgggggaggggctggttggaaccggccggaaccggctgtggagggacctaggcctccctgcggcgactccggggtctgggacccgagttccctcggccgcaaggtggggctgggccaggagctgggaccccggtcgtcctgtcccgtccctgcgcgacgcctgcggccccgcagccccgcgtctccccacatggtgcgggggccgcgggagggtcatgggggtatccctcctcggatgtggttcgtgttgcaggagctgcggtctgtggccgccccccacagtcccgcctttctcccgttaaaaatttagagtttatttgagcaaacagcggctcatcgatggagaagctcccggtcgtggtttgtggcttggggatccgttggagggaatggaaggaaaggctgtaaggtgcaggaggaagcgaaccaaattcagtacttggttggtgacagttatgcagtcgccttatttgctctatctaggtggacattttctgcttatgtagtcagaggtggattggtggttgtggtttattaaccctaaattttatttccttataaactggtaatttataagaatttcatttgaggctggagcgcggtggctcacgcctgtaatcgcagcgcttttggaggccaagacaggaggatcgcttgggcccaggagttgaagatcagcctcgcaatatagcgagaccccatctctgttaattttttttaaatgaacatattcagactgagaccaaaaaactactacaaatttttaaaatataaaatcaaataaaagaatttcattcgacttagatttctgtttccttgggtaggaaaccaggacaccatagccacagccctctaattgtctccaaattaattattttaacactccccagggggacagggtcccaaatccttgaccttgttcccctagcctgactcctctggcgcttgcaaataattcttgataccacttctttcaccatattcccaaaaggtaactccagtcacgacattatcaactctttgtcctttattgcacatttcaaactaattaatttgtattattttttcaaggagcaatcgattggtcttttaaaaatatttgctttctgtttctgaacatttcacaggagaggaaagcagagaatacatgtatgagaccctgctgtgaaaaaacctttgtgcctcttctccttttctctctcctaggcacagggatgttctcagaatgtcttttggttggcctggtgccatggctcatgtctgtaatcccaacactttgggaggccaaggcgggaggatcacctgaggccaggagtttgagaccagcctgagcaacatagtgagacccggaccctaaaataaaaaaaacaaaaaacagtgtctttgggttggggttcccctttggaaactttaaactgtgatatgtcttcagagcatcctcctttcctggtcctgggcttcagggctgtttgggctgacacaggatgcccacagcagccagatctgttgaagggtctggtatcagcctgctcccactggacagcctgaagtacggggtggggcctcttagtggaggagctgggtgtcctggggtcggaggaatctcttgatatcccctccctctcaaagctcacccctgggacactcagcttttcttcccctaattccagatcccattccttgggggacacattggtgtccagccaaatggatgatggtattgaggggaaaaacagatatgattcttgccctctggattcttttagactggtgaagtgagaaaacttatcccaaggacaggaaaacccatcccactgaggtgatgcaagaacttgaaaagcaaaatgtacttcaggcagatggaggcaaaatgcagtgtctcttggaagggtggtcactgagcccttcagtgagcaggttagggggtggacgatatcccaggtgatagaatgacctgacttaggccgggcgcggtggctcacacctgtaatcccagcactttgggaagctgaggtgggcggatcacttgaggccatgagttcgagaccagcccggccaacatggcgaaaccctgtctctactaaaaaatacaaaaattagctgggtgtggtggcaggtgcctctaatctcagctactggggaggctgaggcatgagaatcgctttaacgtgggaggcaaaggttgcagtgaaccgagatcacaccactgcaccccagcctgggtgacagagcgagactctgtctcaaaaaaaaagatgtgaaacttgagtcagacgtacctctgttccaggttagcgcagccccttcctgggtttgtcccctgcaaaagatttgttcacttattgcagtttcagtttttttcttttttaagtaactataaatgtatttcatcagtagaccttgaaatataagacagttttgcaaagaggcaagaaggaagtggatttcagaaaacattaaatatctagtcttatgtttgttaaaaattattacttatggctgggcgcgatggctcacgcatgtaatcccagcactttgggaggctgaggcaggcagatcacgaggtcaggagatcgagaccatcctggctaacacagtgaaaccctgtctctactaaaaacacaaaaaattagctgggcatggtggcgggtgcctgtagtgccagctacttgggaggctgaggcaggagaatggcatgaacctgggaggcggagcttgcagtgatccatgattgcgccactgcactgcagcctgggcaacagagcaagactccatctcaaaaaaaaaattattatttttttctttcccaaagcaagtgtagtaagtttctcaagtatgttgtttttttttgtgggggtggggtgtggtgatttaaaatggaattccagggcttagtgttgggaatactaaggaaaagagagagagaaaactctcttctatcatgactgcagaaaatgaatacatttccacaagtaagtgtagcaaataaattggtgaattacagagattcaccaaaacatcaattcctctgctttgcagggtggcaaacttgtgacagtggataactgttctcttcctgttatctagacatcagagtttaatgcgaagtcctagtaggacaggacttggtaactcctagaagtgttccaatatgatttagtacatgatttgttaccatagaaagaataaataacatgtttattgtctgaagaggatggatacttttacttttcctgttaaggtatgaaatataagtgccttacaatttccttccttgctataaacagtgaatttgagtgattttactggaatcttcaaaccctgggtattttctcattgaaaattaaatgcataaccttgactgggaaacagagacagcagactagtgacttgaaactaagaccaatcttgagccttcaaagagaggacattacaggcccagtggttcttgctgaggagcctcccctgcagtgtcccagctgctcacaactgactttgggtggagccctttatagtgagagaagctcagagccctggaaagctggggattcataggcagaggtggttgaggtgatgcctttctgagaatgtacttgctattatcttgggtctgtttgtagacgtttctaatgaaacaaatctggatttaggtaaggagtgatttattttatttttatttatttattttttttgtgtgtgacagggtctcactctgtctcctaggctggagtgcagtggtgcgatcatagctcactgtagccttgatctcctgggctcaaggaattctctcacatcagcctcccaagtacctaggactaaaggcatgtgccatgatgcctggcttatatttttaaaaaagtttttttaagagagacaggacgttgttatgttgcccagactggtctctaactcctggcctcgagcaatcctcccaccgtagcctccccaaattccaggattatgggggtggggcggggagcaccaccacaccagacaggaatgactattctaaaggataatcgaaaggggagaaggcaccaagtataaaatcttcaagcatctcaggctgggcgtggtggctcacgtctgtaatccatgcactttgggaggccgaggtgggtggatcacaatgttaggagtttgagaccagcctgaccaacatagtgaaaccccatctctactaaaaatacaaaaattagccgggcatggtggtgcgtgcctgtaatcccaactactcgggaggctgaggcaggagaatcgcttgaactcaggaggcagaggttgcagtgagccgagatcgcgccactgcactccagcctgggcgacagagtgagactctgtctcaaaaaaaaaaaaaaaaaaaaaaaaatctgcaagcatctcagagtttatgcagaaaaggattttcttttgtagggaggagcaaatgatgagaaagaaggtgggaggtggaaggcaggatgcagggtgcaaaatcccacctagatcctgaaggcagtctcttcttaggagggtcatcagaggggttgtatataggctcaggctgggggtgggtcaaagttcaggggctggaggaagaagagaaacttaaccaaagttttgttaacaggtactttgttctgactgatcactgaagacagagctgttcagctaatcaattgtgaggaaaataaagggaatttctagtctgtgtatggctttgtcataggtaaaaaagcagtgtcatctaagtcataatgagaagagtgtttctttgcgtaacctgctcctgcagaatacaaaagacgggggagtttctttaaccatagctatttccaggattacatacctgcccaatcttctgccgccattttcccttacatccatcccttccatttcgccatttctgatttatatgcagttgctgagaagtatgggtgatccctggggcttgtgactggcatctgcagtggggcactgttatggtaatgagccctgaacttgtggggtccccgttaactctgggtagtgtcagaattgatttgaatgcttaattggtgttggagaattggagatttggttgtgttcagcaaacaccacacatttggtgtcagaaatggtatatgaaaaaagacactagagatcagaaccttcacctggctctgggtaagtgttcgctggtgagaattgagaccctggaggagggagcatttccacactgtgaggagaggagagtgggttgtgtgaaacacctgtggactcactacccaggttcataaatgggcattgggcatttctggtatgtcctgatcttgtctcccgtctgtacccacaggtgaccaggtcctcatttttaaaaggtggttcttcatagttttaccatctatttatcattaggctgaattttgcttggctcttcctcttttgaatttttagtaagttattaccattaatattatgccaaaaagagtttttttttggtttctttgcctgtttgtttcacgcatgctggtttctgcatttagtttgggggttaggatttcagcaaatgaaagtttgggcaggggatggtggtggaatacaaacattcagtctgttaacaatcctaactgtattttgtacgacatcttggctattcttagccttttttttttttttttttgagatggagtctcactgtgtagcccaggctggagtgcagtggcgctcttggctcaccgcaacctctgcctccgggctcaagtgattctcccacctcagtctcccaacaagctaggactacaggtgcacagtaccacaccagctaatttttgtattttttttttttgtggaggcggggttttgccatgctgtctaagctggtcttgaactcctgggctcaagcagtccacccagctatgcctcccaaagtgttgggattataggtgtgagccactacgcccggccttatttttgtctgttttttgtggaagtgatatcatcctatatgttatattgtatgccatctgtctatttcacatagctgtgaatcttccatgaaatggtattttattcactattttacttaataaactttattttttagaccggttgtagtttgacagaaaaattgaacagataatacttagagtttccttattctcctccacaggtgattgttttcccctacttttctttttttttaagagacgaagtcttgctctgtcacccaggcttgagtgcagtggtgcgatcactgctcactgcaggctagacctccagggctcaagtgatcctgccgcctcagcctcccaagtagctgggaccacaggtgtgcaccaccacatctggctaattttttttttttttggtagatgggggtctcactatgttgtccaggctgatctctaactcctggctcaagtgattctcccatcctggcctcccaaagtacgtaaatatgatatcatatatatcatataattgatgaaccaatatatcatatatgatgatgatcagaattggtgagccaatatgttactaactaaagtttacacttcatcaaaattggtaatttttgttcttcaaaggacaccaagaacttgaaaagataattcaccaagtggaagaacgacttgcaaatcctgtgtctggtggggcatcttatccagaagcagcctgagtctcagtcccctccatcacactccatcagggtgggggctgaattggcagccaggactcccaggtatcctgtcccatcactgtaggaggcagtctacctcctggacctctctctgggcagttgtgcacctgcaatcctggatctcacccagatcatggggtgacaacagggagtggccatccagagagaaatctgagcctggtgttttgggtttgtgggtgggaggtactctcaggacaccctccccctccatggattcagacttgggtgggcccagcagaatggcatgtgtggttcccagctccttcatccccagtgggagggagcctgtcatcccctatgcatttcagataaatgaaccagggtctcaagtttacagccttgttccctgttaaagagagattgcactggaaacttgttaagaatgtcaaggaaaagtttattaagcacaattgcagtgagtcatgacagctgtaataggggagggagattgaattcagccttgaatgcagcaggaatattattggatttatagccaatgtacaaggtgagggagagaatggaacttggttgggtctcataggtgggagaaaaagaacttgattggatattaaggtaggaggagtctctataaactaccttagatggattcttgctgaaactgacttctgcaggccagtgccaagccctagtcaaaaagagggctctgaggagcttgactcaagtttggtgaaggaaggagtacttgagacctcttcagcctagtttttctttctttctttttttttttttttttttttgagatggagtcttgctctgtcacccaggctggagtgcagtggtgcgatcatggctcactgcaacctctgcctcccaggttcaagcaattctctgcctcagcctcccaagtagctggggttacaggtgcccaccaccaggcctgactaatttttttttgtatttttagtagagacaaggtttcaccatcttggccagggtggtcttgaactcctgacctcatgagccaccgtgcccagcctcttcagcctagtttttcccagggctctgtattagtctgttttcatgctgctaataaagacatacccaagactgggtaatttataaaggaaagagatttcattgacaggtcagtatggctggggaggcctcaggaaacttacaagtatggtggaagggaagcaaacatgtccttcttcacatggcagcagcaaggagaagtgcagactaaaggtgggggaaaggtgggggaagcccattataaaaccagatctcatgagaactcactattatgagaacaacatggaggtaaccaccccaatgattaaattatctcccacttgctctctcccatgacattcagggattatgggaactacaagaggagatttgggtggggacacagccaaaccatatcattccacccccagcccctcccaaatctcatatcctcacattttaaaacaatcatgccctcccaacagtcccccaaagtcttaaatcattccagcattaactcaaaagtacaagtccaaactcatctgagacaaggcaagtcccttctgcctatgagcctgtaaaatcaaaaacaagttagctacttcctagatacagtcattgggtaaatatacccattccaaatgggagaaattggccaaaacaaaggggctagaggccctatgcaagtcccaaatccagtagggcagtaattaaatcttaaagctttgacataatctccttggccaggcgcggtggctcacacctgtaatcccagcactttgggaggccgaggcaagcggatcatgaggtcaggagatcaagaccatcctggctaacatggtgaaaccctgtctgtattaaaaatacaaaaaattaggcatggtggcacgcgcctgtaatcccagctactcgggaggctgaggcaggagaattgcttgatcccagaaggcggaggttccagtgagccgagatcatgccactgcactccagtctgggtgatagagccagactctgtctcaaaaaaaaaaaagaaagaaaaaaagaatctcctttgactccacgtctcacatccaggtcatgctgatgcaagaggtgggctccctcaaccttgggcacctctgcccctgtggctttgcaaggtacagcccccactcctggctgctttcacagctggcactgagtgtctgtggcttttccaggtgcgtggtgcaaactgtcagtggattgaccattctggggttcttgaggacggatggtggccctctcctcacagctctactaggcagtgccacagtggggactctctgtgggggctccagttcccacatttctcttctgcgctgccctagcagaggttctccatgagggctccgcccctgtagcacacctctgcctggacacccaggcgtttttgtacatcttctgaaatctcggcagaggttcccaaacctcaattcttgtcttctgtgcacccacaggaccaacaccacatggcagctgctgtggcttggggcttgcaccctccgaagccatgacccgaattgtaccttgcctccttttagcaatggctggagtggctgggcacagggaaccaagtccctagggtgcatacagcaaggggccctggaccaggcccaggaaaccaaccattttttccttttaggattctaggcctgtgatgggaggggctgccatgaaggtctgtgatgtgtcctggagacattttctccattgtcttggtgattaacatttggcttctcgttactcacaaatttctgtagctggtttgaatttctccccagaaaatgggtttttcttttcttttctttttttttgagacagagtttcactcttgttgcccaggctggagtgcaatggcgcaatcttggctcactacaacctccacctcccaggatcaagcgattctcctgcctcagcctcccgagtagctgggattacaggcatgtgccaccacggccagctaattctatatatttagtagagaaggggtttctctatgttgctcaggctgctctcaaactcctgacctcaggttatccgcctgcctcagcctcccaaggtgctggattacaggcatgagccaccacgcctggctgggtttttttttctgttccattgtcaggctgcaatttttccaaactttaatgttctgtcacctcttgaatgctttgccgcttagcagtttcttccaccagataccgtaagtcatctctcacaagttcaaagttccacagatctctagggcaggggcaaaatgccgccagtctctttgctaaaacataacaagagtcacctttgcttcaagttaccaacaagtttctcgtctccatctgagaccacctcagcctggactttattgtccatatcactaccagcattttggtcagagctatccaaggagtctctaggaagttccagactttcccacatcttcctgtcttttgagccctccaagtctctaggacgttccaaactttcccacattctcctgtcttcttccgagtcctccaaactgttccaacccttgcctgttccccagttccaaagttgcttccacattttcaggtatctttacggcagagcaccccgctacccagtaccaatttactatattagtccattcttgcgctgtgaataaatacatacctgagactggataatttataaaggaaagaggtttaattgacatacagtttagcatggctgggaaggcctcaggaaacttaatcatgacggaaggaaaaagcaaacatgtccttcacatggtggcagcaaggagaagtgcagagcgaagagtggcaaaagccacttatgaaaccatcagatctcgtgagaactcactatcatgagaacagcatggagggaaatgcccccatgattaaattacctctcaccgggtccctcccacaacatgtggggattatgggaactacaatttaagatgagatttgggtgggggcacagccaaaccgtatcagggtcaaaataagttcctaagtttctggtttcccttgccacaatcccagatgtcaacttcccctctccagttgacattatcttcaattatgtctcccccatgctaggtttgaagcagctgtaatattttagttatttataattttccatagaataataaataacaattttaaagatttatctttttgtcagtgtatattttacatgagacaaaagctattcaagtggtgagtagccatttgaaattacattgtgtaaaatctgtgtccctaatgattcgtggtgttgagcatatttgtatgtgcttattggccatttgtatatatcctggagaaatgtccattcaagttctttgcccatttattatttatttatttttattttcacttttttttggaaagagctatgatgcccaggctggatttgaacgcctgggctcaagatccttctgccttaggttcctgaagctgggattacaggtgtgttccagcatgcccagccaattttgcccattttctaatcaatgtgttttttgctggtttattacaataacttattattattattattttttgagacagggtcttgctgcattacccaggctggagtgcagtggtgccatctcggctcactgcaatctccgccttctgagttcaagccatcctcctgcctcagcctcctgtgtagctgagactagagggcatgccaccatgctcagctaatatttgtattttttgtagagacagggttttgccatgttgtccaggctgatcttgaactcttgagctcaagctgtgtgcccacctcagcctcccaaaatgctgggattataggcgtgagccaccatgtccaacaatttattattattaattgtggctataaaaacaattaaaaatctaccatcttaagcatttttgtgtacagtttagtagtgttaactatactcaccttgttgtgcaaccaaactccagcaattgttcccattctctcaaatttattttttctttcttcaaggtggttaattttatcttcaagttagctgattcttattttgcttgcttgaatttgccattgaacacctatagagaaattttcattttagttgtgctttgcatcttccagatccgtacttcctgggtagtcttttaaaaaattttatatatatatatatatatatatatatatatatatatatatatatatgtattttttcccccccgagactgagtcttgccctgtcgcccagagctggagtgcaatggcatgatctcagctcactgcaacctccgcctcctgatttcaagcaattctcctgcctcagcctcccaggtagctgggattacaggcgcctgccaccatgcccggctaatgtttgtgtatttttagtagagacggggtttcaccatgttgaccaggctggcctctaactcctgaccttgtgatccgcccaccttggcctcccaaagtgctgagactgcaggcgtgagccaccgcgcctgtaattttttgttgatattattgcatgcatccttttcttagttttctttatttctttctccatggttgtctttactactttgagcatagttaaggcggttgcttaaagtcttcgtccagtgagcgcaataactggagattctcaaagatggtttatctcaattttttcccattgatgagccatatttttctgtcttctttatgattttgtttttgttgaaaagtgggatttgaattttttttttttttttttttttgagacggagtcttgctttgttgcccaggctggagtgcagtggcacaatctcagctcactgcaacctccgcctcccgggttcaagcaattcttttgaattcaagtcttttgaattcttctgagcccagaaaaggtcttttctggaaatgcgttctttcctggacatgaagggggcattctcaattccccagcatacctgggtttttctgagtatcctaatttctgaaagaaatttttctcctcagcttttcttcccaggctttagatggtctatcatatgtctcagccataatctgttggctcaggtagcttcagggtttttgtttactttatgacatttcaagcagttgctgcccttttttttcctcaaaaaataaaaataaaacagtcagatgtggtagtgtgcacctgcagtcccagttactatggaggctgaggtgggaggatcatctgagcctagggaggtcgaggttgcaataagtcgtgattacgccactgcactccagcctgggtgaccgagtaagaccctgtctaaaaacaacaacaaaaccttgtgtaactgctgctaattagagtatatattcagggcaacttgaatctgtactcctggtttgcagtcctcagctctggccccaatagactgtccatttgtattgattttgcctaagtttcttccttttagatcaacaaacttatggagcgcctttctgtttcatagatgggatgcttcttgattcgtgactcgctaataatagccaattagatcactgaactctttgttgaaatattttctttcttttttgagactgagtcttgctctgttggccaggctggagtgcagtggcgtgatttcagctcactgcaacctccacctcctgggttcaagcgattctcctgcctcagcctctggagtagctgggacttcaagcatgtgccaccacacctgactaatttttgtatttttagtagagacggggttttaccatgttggccaggctggtcttcaactcctgacctcaagtgatctgtccgccatggcctcccaaagtgctgggattacaggtgtgagctactgtgcccgaccccaaattcttgaccttcttgccaacacttgttctttggagtggttgatttttattgtgagtcataggagttttttatatgttcttgatactaacaccttgccagatatatgatttgctgatactttttacaattccctggttgccttttcccagtgttgatagtgtcttctgacacagaattatttatttagagacaaggtcttgctctgttgcctaggctggagtgcagtgatgatgtgatccgagctcaccccagtctcaacctcctgggctcaaggaatcctcttcccccagctgcctggcctacacaagtttttaattttgatgaaataaaatttgtcttttttttcttttgtgaaccatgttctggtgttttatccaagaaatcaatgccagacccaatagaaacttttgctgtgtgtttttgtttaaaaaggaaaattagaacagagttaaaagatccagttggcttttatttgcaattcatgaattggggtaccatcccattctataaaatagaataagagctcccgctgggcgtgacagaagggtgggttttgtaaggaacaagagaaacagaacaacaacaaagcagactggttaacatcaggttacttttattgaaagggtaaagcagaggggacgtccttattatgccagctgagattgactgggccctttcctattggttgctgtgagtctcctgttttggggaaaaactgggtatgtttgaggatctacctgcttctttaaaaattttagtttgattatgtggcacttagcatgagtgactccattttggtttggtctcatttgttggggactagtataggattttagtccaaaaaaatggcctgcataatttttactattttcttctaagagttgtttagttttagctgttacctttaggtctttgatccattttgatttcatttttgtatgtaagttaagggtccaactgcttttttttttttttttttttgagatggagtctcgctctgtcgcccaggctggagtgcagtggtgcgatctcagctcactgcaagctccacctcccgggttcacgccattctcttgcctcagcctcccgagtagctgggactacaggcgtccgccaccacgcccggctaattttttgtatttttcgtagagatggggtttcactgtgttagccaggatggtctcgatctcctgacctcgtgatccgcctgcctcggcctcccaaagtgctgggattacaggcatgagccaccgtgcccggcctgctttttttttttttttttttgagacagagtctcactgtcatctaggctggagtgcagtggggcaatctcagcttactgcaacctctgcgtgctgggttcaagcgattcttctgcctcagcctcccaagtttctgggactacaccagcccaccacgcccggctaatttttttgtatttttagtagagatggggtttcaccatgttgaccaggctggtctggaactcctgacctcaggtgatctgtctacctcggcctctcaaagtgctgagattacaggcatgaaccaccttgccgggcctcaactgcattttttcacatgtaggtatccagttttcccagaaccatttttttttttcaacttttatttttggttgagggagtacctgtgcaagtttgttacatgggtaaattgcgtgttactgggggttggtgtatttcatcacgcaggtagtgagcatagtatctgataggtttcttttccaccctcaccctcttccaaccctcccacttcaagtaggccgcggtgtctgttgttctcatctttgtactcatgtcatcaccattttttgaaaagtatttttttccaataatgaatctgggcacactcgccaaaagtcattttaccatttatgaatgtgtacctcccctcccctccctcccttcccccctcccctcccctcccctccctcccttcccccctcccctcccctccttcccccctcccctcccttccccccctcccctctcctttcctttcctttttcctttcctgacatagggtctcacttggtttcccagcatggtcttgacctcttgacctcaagccatcctctggtctttggcctcccaaagtgctgggattacaggcatgagctaccatccctggcctgaaggtggtatctgttaagagcaattccctgagcatatttcaagatgactactcttaccctcttcctgccataagcaggaagcaatttttctatgatcttcactgtgagaactgatgaagtttctggaggtagagctcacacatttctgggggccccctatgactggatcccctggatttttacctctttttttttaaaaaacagctaattaaaaaaaatatttagtagacaagaggtctcgctatgttttccaggtcagtcttgaactcctgagctcaagtgatcctcctgcctccatctcccaaagtgttgggattacaggcgtgagccaccgtgcccagccagatttttacacttagcctttagtaattcattagttgcaatttaggttttcctacccctgtactgcttcccacagagattttgctatgggagtctgttctagtaagttatgactcttttatcagttaggttggtgggatcctgtctaaaatccagtacccagatactgtcaaagctcaaactttgtgaacaagcatttctaaagatacacagtctcagggtggctaatgttaactcttttttctgcactctagttactagatttttttttttttttttttttttgagacggagtcttgccctgtcacccggtctggagtgcagtggtgcaatctcagctcactgcaagcttcgccttctgggttcacgccattcttctacctcagcctcctgagtagctgggactatgggcacccaccaccgtgcctggctaatttttgtatttttagtagagatggggtttcaccttgttagccaggatggtctcgatctcttgacctcgtgatccacccgcctcggcctcccaaagtgttgggattacaggcgtgagccaccgcgcccagccactacatgtttgttacaacaggtgctacaggcctaccttacagagagacattaggggtggcccaggcagtacatacttctcccaccagagaggcatgctcctattctgctgttgctagttcagttctagcagcagaattgctttgtggaaggaagtgagtctagacagagggtaagtttgatgactgtggaatcttgaaataaatgtttggaaagcatagcatcctgagaacttcttgggaataaagtctaggcccccagtgctgtctgtctcaaccttcctcctccacacatgggggatgtttcaggattcagtggcctttgaggatgtggctgtgaacttcaccctggaggagtgggctttgctggatccttcccagaagaatctctacagggatgtgatgcgggaaaccttcaggaacctggcttctgtaggtaagggtgacaatattcctttcctcagtgaattagagaacaagtgtttctagctccttaacactttggggaataaaccaggcatgggtacagggaattatgaatatagaatctaatacttttttcataattttatactaattcataatgacttttctgggtctaaattttaggaaaacaatgggaagaccagaacattgaagacccattcaaaattcccaggagaaatataaggtaatttgcactcacaaaagaaagttctgttccttgagagcatttcgtattgttaggaattttttttttttttttttttagatgaagtctcgctctgtcgccaggctggagtgcagtggcacaatcttggctcactgcaacctccgcctcccaggttcaagtgattctcctgcctcagcctcctgagtagctaggactacaggcacgtgccaccacgccgagctaattttttgtatttttagtagagacggggtttcaccatgttggccaggatggtcttgttctcttgacctcgtgatctgcctgcctcagcctcccaaagtgctgggattacaggcctgagccaccatgcccagcaggaatttttaaaagcaagcaaacaacatataagcccagcttcaaactgttttgtttttagaaaatcttctccaagccaggcatggtgactcacgcctgtaatcccagcactttgggaggctgaggtgggcagatcacgaggtcaggagatcgagaccatcctggctaacacggtgaaactccgtctctactaaaaatacaaaaaaaaagttagctgggtgtggtggtgggtgcctgtaatcccagctactcgggaggctgagacaggagaacggcgtgaattgggaggcagagcttgctttgagccaagatggcaccactgcactccagcctgggtgacagagtgagactctgtctcaaaaaagaaaaaaagaaaatcttctccaaaaacatagttaagtgtaacatagatgttcagtgtttgcaaaatagttcaattatagatagtattaagaaacttcatacgaatatctttttttttttttttttgagagggaatttcacaactcgttgcccaggctggagtgcaagggtgccatcttggctcactgcaacctccgcctcctggattcaagcgattctcctgcctgagcctcccgagtagctgggattacaggcgcctgccaccacacctggctaattttttgtatttttagtagagacagggtttcaccatgttggccaggctggtcttgaactcctgacctcaggtgatccacctgcctcagcctccgaaagtgctgggattacagatgtgagccaccacacctggccatgaatatcattttctttctttcttttttttttttttgagacagagtttcgctcttgttgcccaggctgaagtgcaatggcatgatcttggctcactgcacctctgcctcctgggttcaagcaattctcctgcctcagcctcccgagtagctgggattacacgcgtgctccactgcgcctggctaattttttttattttttatttttagtagagacagggtttctccacgttggtcaagctggtcttaaactcctgacctcaggtgatcctcctgtcttggccttccaaagtgccgggattacaggcataagctactgcgtctggccatgaatatcattttttgataataggtatggttgtgacctattgcagaccatttagtccactcatgttcaaacagttgagacaggcataaaacgtacactttccctggtaatgttaaacatgtgaatccaaggccaggcatggtggctcacgcctgtaatcccagcactttgggaggcagaggtgagaggatcccttgagccttggagttcagggttcacgcctgggcaacatagtaagattctgtctctgtatttaaaaacaagtatatgtaagtctaatacctattaataaatataaaatcatttataaacaaaacattaataatgtacttctcatttttctgacaagtcatattccagagagactctgtgaaagtaaagaaggtggtcaaggtgaagaaaccttcagccagattccagatggtattctgaacaagaaaactcctggagtaaaaccgtgtgaaagcagtgtgtgtggagaagttggcatgggtccttcatcacttaataggcacatcagagatcacactggacgtgaaccaaatgaatatcaggaatatggaaagaagtcatatacacgtaaccagtgtggacgagccttgagttatcatcgctcttttccagtacgtgaaaggactcatcctggaggaaagccctatgattgtaaggaatgtggagaaacctttatttctcttgtaagcattcgaagacacatgttaacgcataggggaggtgtaccttacaaatgtaaggtgtgtgggaaagcctttgattatcccagtttatttcgtatacatgaaagaagtcacactggagagaaaccttatgaatgcaagcaatgtgggaaagccttcagttgttccagttacattagaatacatgaaaggactcacactggagataaaccctatgaatgcaagcagtgtgggaaagctttcagttgttccaagtacattcgaatccatgaacgaactcacacaggagagaaaccctacgaatgtaaacagtgcggtaaagcctttaggtgcgccagttctgttcgaagtcacgagaggactcacaccggagagaaactttttgaatgtaaggaatgcgggaaggctttgacttgtcttgcaagtgttagaagacacatgataaagcacactggcaatggaccttataaatgtaaggtgtgtgggaaagcctttgatttccccagttcatttcgaatccatgaaaggacccacactggagagaaaccctatgattgtaagcaatgtgggaaagccttcagttgttccagttcgtttcgaaaacatgaaagaattcacactggagagaaaccctataaatgtacaaaatgtgggaaagccttcagtcgttccagttacttccgaatccatgaaagaactcacactggagagaaaccctatgaatgtaagcaatgtgggaaagccttcagtcgatccacttactttcgagtacatgaaaaaattcatactggagagaaaccctatgagaaccctaaccctaacgcttcagttgtcccagttctttcatgagcatgaaaggagtcacatagagaaaccccatgaaagtaagaaatttgggaaagccttcagtcctttctgtttctttcaactacgtgaaaggattcacagtggagaaagaccctgtaagataattggctttaaattacgagagacttgtgataggacagtaaaacctagagttggagttggatctctggattgtgttatgtcagtgttggtaggttaggaactagatttcccagaatccattccatttgtgattccatgatacaattcaccagtaacctatcttacatgagattcggaagtaagttaagaaggcattagtcatggtttggaagcaccatacagggagacagctgtgtgaatacaggctgtatggacacttgcttccatcccattttcctgcttctttgggttgccaatcaagagtatcctcaaaacgacttgactttaattttctcggaggtgataggcttccacacaggtctccagaagccctgcattgaatatccatccacactttggttttccttcagacattattatgtctgtactaggcaactaattcagactgtcctggttgggaatattctgtgatgctctgactcccctagtctgtagacggaattggcatacggtctaatttgtgtagtaagcacctttgttcatactagtagtgactgtattcttgattcagcctgatagctaccatgctgctgtcaaaaccaaccagaggggagcttgttcttctgctgtagtgtgcagtgactggcctcacccaggactttgatgtgagaatgagcactttcctctatcaggaaatttcaagtgtttcctgttattcgtagctcaatgtaatgcctcagttcattttcagttgtttgattatatgtgactaatatgtattttttattcaaacaagacttctgtacatgtttcttcaaaacagtttattaactgtcttcagtcttggattacatcaagtttataattttggcaaattgttaagacactgtgaagtcagcgttaaccatgtgcatacaacttaaggaattttttcctcctcatgtaaattttacttttcatgcttatatagtttcaacttttatcttcatagtaatttctcatctactcataataccaaaagttaagtcatgctgttttgtgtgctctcttgctaaagaccgcagagaccatacctgttgtcaaagagggtgtaataaactgtaataataatcatgaccacaaaccataaaggactgtgtgatgtatcagtaagagggtgctcagaagaatttcttacaggttttgtgcttgttataggttggttgatttctattttttttttttttttgatatagagtgttgctctgttgcccaggctggagtgcagtggtgcgatctcaactcactgcaacctccacctcccaggttcaagcaattctcctgcctcagcctccagagtagctgggatttcaggtgcacaccaccacactcggctaatttttgtacttttagtagtgaacggggtttcaccatgttggtcgggctggtctcaaactcctgacctcgtgatccacctgcctcggcctcccaaagtgctgggattacaggcatgagccaccgcacctggccaggttgattgatttatgttcagggaagcaagatgattctctgtatttgatgcagtgatgaggtaaacttaattctaaacttggtaatcataactgttcttatccagaagggaaaaggaatggagtggaggtaaacgtaattcatgagaaataccactcagtcatattagtgagaagaggggaatttgggtcatgtttatgatttggaacatgctgtctttcaccagttttaaagacatggttacagaatgccctttttttgtcttgattcatcatagccacctaggagcatggtctcacattgctggtgtctgacatgtttctctccaacagcgtaagacttggccttgcagtgagcggaggctggctcctggacttgtggacctgtttttgccttacttattctctgaacactgaagtatttcctgtgatgtactggacactgttttccattatgtacctcagttaaaatatgtaaatttacttcttagcaagctgtataatacttttaaaaagctcctttacgagtctaatgagactaatatatttatgcacattttctgaatgcaagcctaggaagggaacaaagtcagcatcaatattccaaccaagcctttcttgctccaataatatgcttttgtttttgtttttgtgtttttgtttttttagacaagagtttcactcttatcacccaggctggagtgcagtggtgcaatctcaactcactgcaacctctgcttcccggttcaagtgattgtcctgcctcagcctcctgagtagttgggattacaggtgcccaccatcacacccggctaatttttgtttcgtatttttagtacagacagggtttcaccatgttggccaggctgatctcaaactcctgacttcaggtgatctggccgcatcggcctcctaaagtgctggaatggattacaggtatgaaccactgttcctggcatatatgcttttgcttctaatttatcaataggcctcttatgccagcactacagagtaaaaagcaacatgcaaaagtcagctttttgtctgtacacttccacggaacaatccaatcacttcgttgaaggtgtccagcaagctcttgttgagaaaatccctgttgaaacttctcagtgtcaaaagcccaggtatcacaggatagagtagcaatcagcaaccaaaccatgactgtatgtggagatgacatattcagccccagataatgtattcacatgagtgaagggtggagtcattgcctgtcagattctacagtcatttggattagagagggcaatacagagttaggtgctactgaatccaaccactgagtccttctcccttgaaggcaacacccacagtgatagtgtgggccacagagtagaaaccccaccatcaacacgactccaaatgtgattttgcccgggatgcaggtgctgtgttgggatgcaggtgctgtgtggggatgaccagtgaaggtaggggacactggaagcacagggtgagggagatgaacaggacacagctgagcctgattattggccttgactgtgggagtatcttgatgcttcacaaacaccccagagaggacattgtagcacaggcccaaagagtgttcataaaccagagggccaccacttttggaaggcagtgatgtggctttctgtttgagtcctgatgctctgttgacagcatacactgttcttcatctgattagaaaagcaatgccggctgggcgcagtggctcacgcctctaatcccagcactttgggaggctgaggtgggcagatcacctgaggtcaggagtccgagaccagcctgacccgccttggacctattggactgaacaaacgggagcaaacacaggaataaaagacaagagacaaaagagtatatttggaagaaggggttggggggcaccttgcctctagtggacaagggccccgagctttacacagccctctgtatttattagacaaaagagcgagaaaagcggggggtgattgttgggtaattgtcagttggccatttggttcacaccaggcttgtgagactgcatcctttggacaataggcactaattttctcagtagataacttcaaggagcccagtgccagggagtgatgtccctcagcaaaccttttggtggcagggcagtgagtttgcccacatcctgcattcatgataaacagtttgctgtttgatcccatatagactcctgcggaatgctgagttggtcacgtcccacgggccttcggctccctgcatatccccctttttgtttatgtattaattgaaagaatgtaaggccaggctgagcagctctcattgtccgattggcggtccatctgattttacagaaaacatagcattagaactgtgttgtgactctgttaggccttctctctctctttgcacccaggctcagctggctcatggctcgtactggagggaccgggcccatggttggccaccctgggttcctcccgtctcccgttcatggtcgcacacaccttgagggcacccaaacggtgtgcccatctcctgtagaaacacaagcatgctctcttccccatgtcagtaaatccaccggacttttccattgtccttcttccagggatttccataacactttcagataaactttcctcttttcctctaacacttgtcaatgtctttctgctggagtcttaccatccggaccaggagccaaaaaaatttaaagtaaataaaaataataaaaagttctgattgaggtggtaagtggcctcctataccccctttttgttttttcaacatgtgttgtaatgtttgatgtgcctgctctataatgccttgtcctctaggattataaggaatttctattttatgggttatagcccaaagctgtaagaaattttgaaaagcatggccagtataagtgggtccattgttagtttttaattgtttaggtattcccatatgagcaaatgatgacagatgatgtcaccatacatgaccagctgtctcacctgtttggcatgtagcatgcagcatttgagaataagtgaaataaattaagcagttctgggtctagtgtacttttaactgtagcagtttctacgcgactggctacatttacaacataagctgaatcacagacaatgttgataggatctgaagctgtgagctgtaaaacctgaatgactgcagttagctctgaatgttgagctgaaaccccagaggtcgttattgttttgggacctttttggaatcacaaatactggagaattccaggggctaactgacttttctttttttttttgagacagtctcgctctgtcgcccacgctggagtaaagctctgtctcccgggttcatgccattctcctgcctcagcctcccaagtagctgggactacaggcgcctgcaaccatgcccagctattttttttgtatttttagtggagacggggtttcactgtgttagccaggatggtctcgatctcctgacctcgtgatcctcccgcttgggcctcccaaagtgctgggattacaggcgtgagccaccgcgcccggcctgctaactgacttttctatatgtcctgtgttcaattgctcttttaccaacagatgaagttcatctagcttcttttgtgataggggccattgatccacccacacaggtttgtcactgagccattctaatggtaaggcagtgggcaaaggagaaatatcaaatatcaatgacccccccgtcagaaatccttgtgtcctagcccttttctatctgtttttccagttactgatatcgggttaggatttcattgtagaaatttccctaaacctttttcactctgatatcccatgttcttcaacattttaaatcctggattatcaaagttttcatttgtaagtctcctatcccatgctgtaagtctcgaccccataaattgatggctatatttgcaacataaggctgcaaagtccagagcaagcttaaagttgtaaaagttctttaataaataaacagagtaacctgataggacgggcgcggtggcccacgcctgtaatcccagcactttgggaggccgaggcgagcggatcacgaggtcaggagatccagaccatcctggctaacacagcgaaaccccgtctctactaaaaatacaaaaaattagccgggcgcggtggcaggtgcctgtagtcccagctactcgggaggctgaggcaggagaatggcgtgaacccgggaggcggagcttgcagtgagtggagatcgcaccactgcactccagactgagcgacagagcgagcctccgtctcaaaaataaataaataaataaataaacagagtaaccttagctctctgagtgctagtaaactcagatcgagtgattgaattatgtggtctctactagcctgctgcttttccatgtttaccagacccatcagtaaaccgtgttaaagccttaggtatgggggagtgaaataccgcttcgaattgccttttacttaaacgaatcctgatgatatgagggtcataacttagcatttggactgcattaatcattaagattgctagctgaaatagtaataagtttaaaaagaaaatctgaacgcgtctctagaagcagagacttaaatgatatactttaaccatgtgcttaaaaccacgggcggaatagcttaaatcttgtaattgagtttttgggctgaccaagtttatggactttaatctggcaaacagtcttgaaaacagtgactcactggctggggaactcaatttaggactcttttagcaagtacaaatcacactatctgtaatcagtgggtaagacagtcattcatgcataagttttcactacacttacaacttttcttcactttctgagaaggacacaacatttttaccttctaatttgacaaatatcatttaattaggtttaaagttctcctttaaagggtaatgtgtggttttacatgcctagcttttaattactcattaatgaattcgtgggccctctgtaatctctttcccttcagaggttactgttttacttaaattgaatttggaaagctaccttaggggtaggagagagataacagtggccattattagaaaagaggtttttcaaattcttacattttacttaaatcttagcagagaatcatagtctgggacgtacgtaacacatgaacttttgctatgggctgctcacagagccagagggctgcggtgcaggtccttggcggcggccgcattgtacttgctcaggttttgcctgtgtctgcgccgctccctccctcctttgccgggggtggggcatgctgccagcctgggcggaccttgtgggcttggtcgctgccagcttttctgctgctgaaccttctattccgcccaccgcttgcttggtcgcgcggtttcggcttctaatgccttttttctttctttttttttgagacggagtttttgctcttgttgcccaggctggagtgcaatggcgcgatctcggctcaccgcaacctccgccttccaagttcaagcgattctcctgcctcagcctcccgagtagctgggattacaggcacttgccaccacgcccggctaattttgtatttttagtagagacagggtttctccatgttgctcaggctggtttcgaactcccgacctcaggtgatctgcccacctcaggtgatctgcccgcctcagcctcccaaagtgctgggattacaggcatgagccacctcgcccggcctttcttatctttttacagacatacacctgcttgccttgccgattttgcattactgagcaggttaagagctctccttctaatgctgcctgctcaagacagggactgatagctgtagcgtatcctctgtcctttttcctatctattggaggaggaggcttaggtaagacctctgtttcctctttgttatttttggcccagtgatattggggctgagggaagagaaggtgataaggcaggtgacgttttctcctccttcctctttttaggctcttctgtgtgtaaactgagccaggactgctctaattaaagcccataacgttaaagattttactgggacctgatgcctttgcacctgatgttgttcaagatttctccccactcattcccagagttctaagcctagcgttccttcttccgggaaccatgggcttatgtactccattattgaccacactagtttttaattccttcaacaacttaaattctagtggggtgtgttcatgaataaactgctgtggattatttgaatcgggccttacggaaataggaaaagtgcaaggtcctaagggctctccagctatggcagcagagcataaagttgtttgttttggggtctctatttctgctactgaaggaggcagtacagatgtttctgcgattggaggaggcggtataggccaatttttatcctccctcacctgttttttattttcagttggcgctgtgggtgggacaacagattctttcagatttttagactcagcctgctgtcccgcagaataataaggagctaatggcagaagtacagtatgaactaaactccaagtggagaaaactgaagaatcaactttaaaacctttttgatgagcctgttttaatccttctcctgctctgtcccaattttccgcatcaagagtgcctgcctgtggaaaccatgggtgatgcgtgaataaccatttgtggcttctgcaggaggttagttagtgcctgcgaattaacctgagctccagactgtctcaacagaaacttaagcaagtgcacataatgtttttcttcagtagacaaattcttccccttgttaacctgattcagaaaacttccccttcccagtacttctttaaagcactgcccccagtacttctttagggcactgaccttacatacgctatcggcagactcatcccggagtccccgtgcgtcttgtcaatttcagttcctctactccagcagaccttcttcgttcacgtcctcatagtcccgtgtttggactgccgcctgttcgagtgccacttatagagcttccgatcctgtcgctgtttggggtgccactgtgtaacctgcacggacctagggggactgaacaaaggggggcgaacgtgggaataaaagacaagagacaaaagagtatatttggaagaagggatgggggcagcaccttgcctctagtggacaagggccccgagctttacacagtcctccgtatttattaggccaaagggatagtgagaaaagagggagtgattgtcgggtaattgtcagttggccgtttggttctgtttggttcacagcaggcttgtgagactgcatcctttggacaataggcactaattttctcagtagataacttcaaggagcccggtgccagggagtgatgtccctcagcaaaccttttggtggcagggcagtgtgagtttgcccacaacctgcattcatgataaacagtttgctgtttgatcatatagactcctgcggaatgctgagtttgtcgtgtcccagcggcctttggctccctgcactgaccatcatggagaaaccccgcctctactaaaaatacaaaattagccaggtgtggttgcgcatacctgtaatccccgctacttgggaggctgagacaggagaatcgcttgaactctggaggtggaggttgcggtgagctgtgatcacgccattgcactccagcctgggcaaaagcgaaattctgtctccaaaaaaaaaaaaaaaaaaaaaaaaaaaaaagaaagaaagaaagaaaagaaaagaaaaaagaaaagcaacgctgcagtttgtaagtttcaacaatttagaattaaaagttattttggcaatctaggactcattcttcattctggctgcagacagagctatggatagggaatgtcacacatatttttaaggttatgttgtcttttatgttaaatggataacatttccactttgcgtttccatatgcaatggaaggccaaggcagcagaatcccttgaggccaagacttcaagaccagccgggcaatatagtcagactgtgtctctacaaaatattttttaaattgtttatataatttatgagattccagtgtcatgctgtcagctaatattaggaaattagtaggtgtgactatggtattctggttatgagaaatgcttcaatttattttattttattttttttttgagacggagtttcgctcttgttgcccaggctggagtgcagtggtgtgatctcagctcactgcaacctccgcctcctgggttcaaacgattctcctgccacagcctctcaagtagctgggattacaggcatgcgccaccaggcgcagctaatttttgtagttttagtagagacgggtttcaccgtgttggccaggatgatctccatctcttgacctcgtgatccgctcgcctcagcttcccaaagcgctgggattacaggcatgagccaccgcgcccagccttttttttcttttcttttctttttttttttttttttgagacggagtcttgctctgtcgcccaggctggagtgcagtgacgcgatatccgcttactgcaagctccgcctcccgggttcacgccattctcctgcctcagcatcccgagtagctgggactacaggcgcccgccaccacgcccggctaattttttgtatttttagtagagacggggtttcaccgtgttagccaggatggtctcgatctccagacctcgtgatctgcccccctcggcctcccaaagtgctgggattacttacatgcttgagccaccgcgcccggcttttttttttttaacagtctcgctctgtcacccaggctggagtgcagtggcgtgatttcggctcactgcaacctccgcctaccagattcaagcgattctcgtgcctcagtctcctgagtagctggaattataggcgtgtgccaccactcctgactaatttttgaatttttggtagagatgaggtttcaccatgttggccaggctggtctcaaattccagaccccatgtgatccgcctgctgtggcctcccaaagtgctgggattacaggtatgagccactgtgcccagcctcagaagtgcttccgttcttgagatgtgaaaattgcctttttagatatacgttaaaaaaaaaaaaatagagatggagccttagtatgttgaccaggccggtctggaactcctggcattaagcgatcatcccatctaggccccccatagtgctaggattacaggcatgagtaaccacacctgagatgttttatatttgcagtttttaataaagcaaagtcaaaaagaacaatttttaggataaatgaccttaggttgaaaacatttttattttcaaggaaaaatttgtgaattcattcctgtaccaaaaaattacatccagttcatttactacagcatgaaattttattgaaaagaacttaataatttcaaatgtgagcagaggttattttattctttcctttcacttactgtctgtctccctgagtttctttcttttttttttttttttttttgagacagagtttcactcttgttgcccaggttggagtacaatggcgtgatcttggctgactgcagtctctgcctcctgggttcaagcaattttcctgcctcagcctcccgagtagctgggattacaggcatgcaccaccatgcccggctaattttgtatttttagtagagacggggtttctccatattgaggctggtctcgaactcctgacctcaggtgatcctcccgcctcagcctcccaaagtgctgggattacaggcgtgagccatcacacctggctggatcttttacctaccatataggtaaaaccatggtcaaaagtgatacagaagcaggaggagcaagatggccaaatagaaccctccagtgattgttcccccaacaagaacaccaaattgaacagctatccacacaaaaagtaacttaggctgggcgcagtggctcacaccggtaatcccagcagtttgggaggctgaggcaggcaaatcacgaggtcaggagttcaagaccagcttggccaatatggtgaaacaccgtctctagtaaaaaatacaaaattagctgggcatggtggtgtgcacctgtaatcccagctactcaggaggctgaggcaggaggatcgcttgaacccgggaggtggaggttgcagtgagccgagatcgtgccactgcactccagcctgggtgacagagtgagactctgtatcaaaaaagagaagaagaaggagacggagaaggagaagaagaagaagaagaaaggagaagaaagaggagaagaagaagaagaaccaaacatcagctgtgcaatcacagtgcctggtcttatattaagtaaagaggcacggaagagggtgggaaagcagccttgaattgcctatgccaccactttcccatcctctcgcagaggccaaatggcatagagagtgaatctgtaagcttgggagagggagagcgcagtgattgtggcactttgcattggaactcagtgctgccctgtcattagcagaaagcaatatggggcagaactcagccagtgcccatggagggagcgtttagatcagccttagccagagttgaattgtccatcccaattgccagaacctgagttctggcaagccctgtcaccgtgggctaaaatgttctggtgtcctgaagaaacttgaaaggtagtcaggatcacaaggactgcaattcctgtgtaagtcttggtgttgggtgggcttggacccagcggacttggtgtgcacatgacctagtgagacactagctggggtggcaaagggaatacttgtgccaccactctcctgaccccaggcagtacagccagcagctcagggagagactacttccttctacttgagaagaaaggggagagtaaagaggacttatattgcaacttggatgcaagctcagcaacagtataatagggcaccaggcagaggcgtgaggcctctattccaggccctagctcctggacatttctagatacaccctgggccagaagggaacctactgccttgaaaagaaggacccagtcctggcagaattcatcaccttctgaacccctgggccctgagtgatcagcaggggtagccaggctgtacttgtatgggccttgggtaagacttagagctgtactggcttcaggtgtgacccagcacctttctacctgtggtggctatggggagagattcctgctgctggaggaaaggagagggaagaataggccaggcgcagtagctcatgcctgtaatcccagcactttcagaggctgagcccaggagttcaagacaacatgaaaaaatcccatctctacaaaaaatacaaaagattagccaggtgtggtggtatgcacctgtagtcccagctacttgggaggctgaggtgggagaatcacttgagcccaggaggtcagggatgcagtgagtcaagatggcaccactgcactccagcctgagagacagagcaaacccctgtctcagaaaaaaaaacaaaaaaaaatttctgtacagcaaaagaaacagtcacagtcaacaaagtgaagagacaacccacaaaatgggagaaaacatttgcaaacaatccatctgacaagggattaataaacaatatagagggagctcaaatacctcaataggaaaaaaagtctaataattcaaattaaaaatgggcaaaatatctgaatagacatttctcaaaaaaagacataaaaatgaaaatcagacatatgaaaaggtgctccacatcatcagagaagtgaaaagacaacagcaataccacatcatctcaccgcaattaaaatggcttttatcccaaagagaggtaataacaaatgatggcaaggatgtgaaaaaaagagacccttgtacactgttggtggaaatgtaaaatactaagccactgtggagaacagtttggaggctcctcaaaaatctggaattagaactaccctatgatccagcaatcacattgctaggtgtattccaaaaagaaaggaaatcagcatatcgaagagctttctgcactctgatgtttattgcagcactattcacaatagccaagattcagaagcagcctaaatgttcatcaaaagatgaatcgataaagaaaatgtgatacatattggctgggtacggtggcttacacctgtaatcccagcactttgggaggccgaggcaggcggatcacgaggtcaggagatcgagaccatcctggctaacatggtgaaaccccgtctctactgaacatacaaaaaaaattagccgggcgtggtggagggcacctgcagtcccagctactcaggaggctgaggcaggagaatggcgtgaacccaggagccggagcttgcagtaagccgagatcgcaccactgcactccagcctgggtgacagagtgagactccatctcaaaatagaaaagaaaagaaatgaaaagaaaatgtggtacatatacatagtggagtactattcagccatgaaaaagactgagatcctgtcatgtgcgacatcatggatggaactggaagtcattatgttaagtgaaataaaccaggcacggaaaggcaaacttcacatgctctcactaatttctgggagctaaaaataaaacaattgaactcatggagataaagagcagaagaatggttaccagaggctaggaagggtagtggaggaggcaggaaaataggggtggttaatgggtagaaaattatacttagaatgaataaaatctagtatttgatagcacacagggtgactacagtcaacaataatttattttacatttaaaaataaaagagtataattggattgtttgtaacacaaggaaacaataaatgcttgaggtgatgaatacctgatttatcctgatgtgatttgatatggcttggctgtgtccccacccaaatctcaacttgaattctgtcttccagaattcccaggtgttatgggagggacccagggggaggtaattgaatcatgggggctggtctttcccatgctattctcacaatagtgactaagtctcacaagatctgatggatttatctggggtttccgcttttgtttcctcctcattttctcttgccaccaccatgtaagaagtgccttttgcctcccaccatgattctgaggcctccccagccatgtggaactgtaagcccaattacacttctttttctttccagttttgggtatgtctttattagtagcttgcaaatggactaatacagtaaattggtaccagcagtgggttgttgctgaaaagatatccaaaaatgtggaagtgactttggaactgggtaacaggcagaggttggaacagtttggaaagctcagaagacagaagatgtgggaaagtttggaacctcctacagatgtgttgaatggctttgacaaaaatactgatagtgatatgaacaagaagatccaggctgaggtggtctcagatggagatgaggaacttgttgggaactggagcaaaggtgactcttattatgttttagcagagactggtggcattttgcccctgccctagagatttgtggaactttgaacttgagagagatgatttagggtatctggaggaagaaatttctaagcagaaaagcattcaagaggtgactaggtgacctgggtgctgttaaaagcgttcgttttaaaagggaaacagaacataaaactctggaaagtttgcagcctgatgatgcggtagaaaagaaaaacccatttttaaaggagaaattcaagctggctgcagaaatttgcctaagtagcaaggagccaaatgttaatccccaagaccatggggaaaatgtctccaggccacatcagacacgtttacacagcccttcccatcacaggcccggaggcccaggaggaaaaagtggtttcacgggccaggcccagggtccccgtgctgtgtgcaatgtagggacttggtgccctgtgtcccagccactccagccgtgactgaaaggggcgaacgtacagcttgggctgtggcttcaaagggttgaagccccaagccttggcagcttccgcatggtgttgagcctgcaggtacaaagaagtcatgaactgaggtttgggaacctccacctagatttcagaagatgtatggaaacacttggatgtccaggcaaaagtttactgcagaggtggggtgctcatggagaacctctgctagggcagtgcagaagggaaatgtggggtcagagccccccctacagagtctttactgggggcactgcctagtggagctgtgagaagagggctaccatcctccagaccccagaatggtcgatccactgacagcttgcactgtgcacctggaaaagctgcagacactcaacaccagcccgtgaaagcagctgggagggaggctgtacctgcaaagccacaggggcagagctgcccaagaccatgggaacccacctcttgcatcagtgtgacctggatgtgagacctggagtcaaaggagatcattttggagctttaaaatttgagtgccctgctggatttcagacttgcatgggccctgtaactcctttgttttggccaatttctcccctttggaatggctgtatttacccaatacctgtacccccattgtatctaggaagcaactagcttgcctttgattttacaggctcataggcgggagggacttgccttgtctcagatgagactttggactgtggactttgggattaatgctgaaatgtgttaagactttggggtactgttgggaaagcatgattgattttgaaatgtgaggacatgagatttggaggggtcaggggtagaatgatatggtttggctgtgtccacacccagatctcagcttgaattatatctcccagaattcccacatgttgtgggaggaatccagaggtagtaattgaatcatgggggatggtctttcccctgctgttctcatagtagtgagatgggtttatcagggatttctgcttttcctttttcctcattttctcttgccgctgccatgtaagaagtgtcttttgcctcccgccatgattctgaggcctccccagccatgtgaaactgtaagtccaattaaatatctttttctttttttcttttcttttcttttctttctttttttttttttttgagatgcagtcttgctctgtcacccaggctggagtgcagtggcatgatgtcagctcactgcaacctccgcctcccgggttcaagcaattcttctgcctcagcctcctgagtagctgggactataggcttgcaccaccatgcctggctaatttttgtatttttagtagagacggggtttcaccatcttggccaggctggtctcgaactcctgacctcatgatctgcccacctcagcctcccaaagcgttgggattacagacgtgagccaccgtgcccgaccaacatctttttcttcccagcctcaggtatgtctttatcagcagtgtgaaaacggactaatacatggttattacacattgtatgcctgtattaaaatatctcttgtacccaataaatatatacacctactatgtacccccccacacacaaaagatagcgttctttgtgtttttaaataggttttgccttaaagtctagtcaagtatgataatggcatatccactcttgttctcttttggttactatttgcgtggaatacctttttacctctgtattaggcttttcttgctttgccataaaaatacctgaggctggataattgataaagaaatgttttatcaactcatgtttctgcaagctttataggaagcatggtgctggcatctgctcaggttctggggaggcctcagagtttttacttttggtggagggtgaagccggagcaggcctctcacgtggcaaaataggaacgagagagagaggtagaggggaggtgccacacactttcaaaccaccagaccttgtgcgaactcagaagaagagctcacctatcactaaggggatggcccaagccattcattagagatctgtccccatgatccaaacacctcccaccaggccctgcttccaaccttggggattgcaattcaatgtgagattttgcggggatgtacatttaaagtatatcatcttccattccatttcgagtattttttgtcttggggtataaaatgagtgtcttggtcatgcattatggctcatgcctgtaatcccagcatttttatttttttaagacggagtctcggccgggcgtggtggctcaagcctgtaatcccagcactttgggaggccgaggcgggcggatcatgaggtcagaagttcaaggccggcctgaccaacatagtgaaaccctgtctctactaaaaatacaaaaaattagccgggtgtggtggtgtgcacctgtaatcccagctactcaggaggctgaggcaggagaatcgtgtgaacccgggatgcagaagttgcagtgagccgagattgtgacattgcactccagcctgggcgacagtgggagacactgtctcaaaaaaaaaaaaaaaaaaagatggagtctcactctcgccaggctggagtgcagtggcgtgatcttggctcacagcaacatccgcctcccaggttcaagtgattctcctgcctcagcctcctgagtagctgggattacaggctcgcgccaccacacccagctaatttttgtatttttagtagagatagggtttcaccatgttggtcaagatggcctcgatctcttgacctcgtgatccacacgcctcagcctcccaaagtgctgggattacaggcgtgagccaccgtgcccggccattcctagcatttctggagactgaggtgggaagactgctggaggccaagacttcaagttcagcgtgggcaacatggtgagatcttgtgttgagaagaaattttttaaaatttacacaattaatgacattttaatgtcattctatcaatcaatattaggtaagtattaggtgtgactgatattctggatatgtataaaattaactcaatatttgagatatgaaagctgccagggccaggcgtggtggctcacacctgcaatcccagcactttgggaggctgaggcaggcggatcacctgaggttaggagtttgagaccagcctggccaacatggtgaaatcccatctctactaaagatacaaaaaattagcccagcatggtagcatgcacctgtaatcccagctactggggaggctgaggcaggagaatcgcttgaacccaggaggtggaggttgcagtgagctgatatcgtgccactgcactccagcctgggcaacagagtgagactctgtctcaaaaaaaagaaaagaaaactgccttttatttttaattttttgtatttttatttttgagacagaatctcactctgtcacccaggctggaatgcagtggctcaatcactcatcactgcaaccccaactgattctgggctcaagtgattctcctgcctcaaccaccctagtagctgggactataggcacatgccactacgcctggctattatttaacttaattttttttggggggggatggagtcttgctctgtcacctaggctggagtgcagaggcgtgaacttggctcactgcaacctctgcctcctgggttcaagcaattctcctgcctcagcctcccaagtagctggaataacaggtggccaccaccatgcctggctaatttttgttttgtatttttagtagagatggagtttcaccatgttggccagactggtctcaaactcctgacttcaggtatccacccacctcaaccgcccaaagtgctgggattacaggcatgtgtcaccgcacctggccccgccaatgtttttaacttaaattttcatactcatgcacgtaactccacattctcctctattcacaggccctgataatctctattctactttatccctttatgaatttgactattctaggcacctcatataagtgaaagtatacaatatttattctggtgtctctggcttatttcacttagcataatgttttcaagttgcatgcatgtgttaacgtgtcagtaattcattgcttttttgtgcctgaaaatattctattgtagggataaatcaccctttgctcatccatttgtttgttgataaacatgtgggttttttccacagtaatattctgaataaggctgctatgaaattggtgtacatgtgtctctgtgtgttgtgcttttgattttttaggatatatacctaggagttgaatagtcacaggggaattctaaattcacctttttaaggaacagccatactgttttacacagtggctgcaatgttttacattctctacatcagtgcacaaggattcccgtttctccatgtcctcatccacacttattataatttttttttttttttttgagacggagtctcactctgtcgcccaggctggagtgcagtggcacaatcacagctcactgcagccttgacttccctggctcaagtgatcctcccacttgaggatcactgggaccataggtgctaagatgggactaccggtctgacccctgctttccatcgtggcctgaactagatttctagattttcaggtttactttgggatgcccttagccgagaggggaatccttcagtttgggagagaggggtgggctttgaattttatttttggtttacacatagaatagctggagtcggagtgtgatttgatatatgtagaaaatctgttaaggtcaagacccattggattaccttatggagaaaaggtttatgaatttgacaatttatgtcagtcagtaccttaaactgactccaggtgagtttcctgctggtgaaaatgaaggtctggggctgggcgcggtgtccttgtctctacaaaaataccaacattagccaggcatgatggcgggtgtctgtaatcccagctactctggaggctgaggcgggagaatcccttgaactcggaaggcggaggttgcagtgagcggagatcgcgctatcgcaccccagcctgggcgacagagcgagactctgtctcaaaaaaaaaaaaaaaaaaaaaaaaagagagaatatgatgaaggtctggaaggagagagtgttgccacactatgcagacaggacaggaaggcatgttgagagcctagagttaaatccttcagtgttcaggcctcatcaccaggttctgatcggttctggggctctgtttcagcagtcagaacctggctcccaagaatctgtttaacctcctgaatagggggtttcctgctgaacagtggctgaaaaactgcttctctgagctagttcatgtttttgcttttcttctcttttgattccttcatagaatattgctgccatataattccagtttttccacacatttaacaattttattccattgttgctgtgtttttattttcttggtgaaaacgagtagactccagggcgcggtagctcacgcctgtaatcccagcactttgggaggccgaggggggcggatcacgagtcaggagattgagaccatcctggccaacatggtgaaaccccgcctctactaaaaatacaaaaattagctgggggtggtggcgcgtgcctgtaatcccagctactcaggaggctgaggcacgagaatcgcttgaacccagaaggcggaggttgcagggagccgagatcgcgccactgcacttcagcctggcgacagagcgagactccgtcaaaaaataaaataaaaaataaaaaaataagactgagagatcaggtgggagaaaggcttggtcatgcagccagcagcttcatcccaaattcctgatccctggaggacatcagaccccctctcctactgcagtgtggcctgtgtggcctcggctccccttctgctccgaggccaggggatgtctccactggacagtgagtctgggattccctgcacacagttgtgaccccccagtcccggaggaagaagcaggaagggctcgcagactattggcaggaattcttcttaaatgcagatattccccgggaggggtcaggtcactgcccagggaggaaccccccctcccccgcccgccccatgccaagagctgtgtctgcaacctgttcatctggctccactcagcactgggagatcacttcttctgtcgctcagtgcctagggggcgggacctggagtactatccaatcagagccgctgggcggggccgtgagaactgtcaatcaggcgtccaggaggctggaggatgcgaggttgaaaaagcccgcggcgtcttctctgtcacccgcgctcggctccctgctcggtcgggctggaacctgtactggcagccggaggtgtaggtaggaaccggaatacctcggaagccgggaaatggtgagtgtccgaggccggggttcccgagacagggtacagctggttgtaaccgaccggaaccggctgtggcgggacccagacctcctcgctgttgtctctggggtctgaggacccgagtgccctggcccagctcggtcctcggtcctctcggcctcagggtggggctgggcctgcagccaggactccgggcgtcctgtccggtccccgcgcggcaactgcggcccaggttccggagtcctctctgggcagctccgcgtccgcagccccgcgtctccctagattgtgcggggacacgggagggtcatggggggaatcctcctcgggtgtggggttcatgtggaaggagcagcggtctgtggggtccccagttcctcctttgtctccaaggggctcgagtttttactgagatatccagatatatgcgaagcagggtctcaaatccgcaactgtgatccctggcctagcttctcctagggctgccagcaaatccctggatttccagatcccgctccgcgttttagagctggcctcctcttcagttcaccacaacaatgtcaactcttcgtcccccaggctttgtttcaaacatagccatatatatgtgtgtgtgtgtgtatatatatatatgtgtatatatatatatatgtgtatatatgtatatatgtgtgtgtatatatatatatatatatatatatatattttttttttttttttttttttttttttttttttgtgacagagtctcgctgtgtcgcccaggctggagtgcagtggcgcaatctcggctcactgaaacctccgcttcctgggttcaagcgattctcctgtctcagactcccgagtagctgggattacaggcgcccgccaccacgcgcggctaattcatgtatttttagtagagacgggttttcaccgtgttggccaggctggtctcaaactcctgacctcaggtgatccaccctcctcagccacccaaagtgctgggattacaggcatgagccactgcaaccgtcctcacacgtttttcatgtatatatgaattatatatatattaaatatatatatataatttttttttttttggtggagacggagcctcactctgttgcccaggctggagtgcagtggcacgatcttggctcactgcaacctctacctcgcgggtctcctgcctcagcctcccgagtagccgggactgcaggcgcgtgccaccatgcccggctaatttttgtattttagtagaaacggggtttcaccatgttggccaggctggtcttgaactcctgacctcaggtgatccgcccgtctaggcctcccaaagtgctgggattataggtgtgagccatggcgcctggccacacgcaatattttaataggcttttttttttttaagagggcaaaatatggctctttttgtaaagatttgttgtgtgtttgtgaacatttcacacttgaggaagcggagaaaaagcacctgacacttgctgtaaacaatctttatgcctctcctccttttatctgcccgaggcacggacaccttctgagaatgtctttgggttgaggtttatctttggaaactttacagggcgatgtgtcctcaactcaccctccatcttatcctggtcctgggtttcagaactgcctggggctgactgaagatgcccacagctaccatgtttcttggagggtgggtcactcctcccagaggacaacctgaggcgtggagttggggcttcccaggagaggagctaggtgccctggggtgggagaagtcccctggtattcccctccttaaaaagctaatcctgggccaggaacagtctctcacacctgtaatcccaccattttgggaagcctgtaatcccaccactttgggaagccgaggcgggtggaccccttgagtccaggagttcgagaccagcctaggcaacatggcgaaaccccgtctctactaaaaatacaaaaaaactagccgggtatggtggtgcgtgcctctagtcccagctcctggggaggctgaggtgggaggatcacctgagccagggaggtcaaagctgcagtcagctgcgatcgcaccactgcactccagcctgggcaactggagtgagacccagtctcaaaaaaaagctctaatcccctgggacactcagcttttcttccccaaatccagattccattccttggggacacttggctcatcagccagttggatggtggtattgaagggacaggacagaaatgattcctgttttctggatgctctcagcatagttaagggagaaaactattcctaaggacaggaaaacccaccccactgagatggtgcaagaacctgaaaagcaaaatgcactttaggaacacaggggacgcacaatgtgtcgtctcctgggagggtggtcactgagcacttcagtgagcaggatggggatgggggatgcccctggtgacaggaggatacgatgtgacacttgagttagacttgtctgtgttctaggtccttactgtctctctctgggcttgtcaccttgcaaagattggttcacctatttcagctgcagattaaatctctacttttggaagcttttcaactatcttttggttatcaatttctagtttaatatgatttgattgcatactttatagcatttctgttcaatttgttaaggcatattttatgcttccagtgtagtttactgtggtgaatatttcatgtgaacttgagaggaatgtgtattctgctggtgttgaatgaaggattctataaatacatattaattaaatgcagttgattaattgatacagtttggctgtgtccccacccaaatctcatgttgaattgtagttcccataatcctcacctgttgtggaagggacctggtggagataattgaatcatgggggtgtttttccccatcctgttctggtgatagtgagttagttctcaagagatctgatggttttataaggggcttccttcttcgctgggcactcgttcttctccttcctgccaccatgtgaagaaggacgtgtttgctttcccttccgccatgattgtaagtttcctgaagcatgtctttattagctgaatgagaacggactaatacattattgatgctgttgagtttagctatatcattagtgatttttttgttgtattgacctattaattatggatagaggtgaactgttggcttccaactataattttggatttgtatattttgtcttatagttttatgtttttgtcttgtatcttgatgttatattttatgggcatacatataagtaataaagattattataccttatgtcttttttttttgagacagggtccccatctgtctcccaggctggagtgcagtggcacaatcacagctcactgcagctttgacctcccagtgcccaggctcaagtgatccttcagcctcagcctcctgagtagctggtactacaggcatgtaccacgatgcctagctaatttttgtttttttttgttttttttttgtagagacaaggcttcgccatgttgcccaggctggcctcgagctcctggactcaagcattctgctcaccttggcctcccaaagtgctgggattacaggtgtgagtcattgcgcctggtcctattatgtcttcttgcaggattgacctcttcactgttacaaaatctcttttacaaggcaatgatggtccggcgtggtggctcacacctgaaatcccagcactttgggaggccaaggcaggtggatcacctgaggtcaggagttcgagaccagcctggccaacacggcgaaaccctgtctctactaaaaatacagaaaatagccgggtgtggtggcagtcacctgtaatcccagctactcgggaggctcaggcaggagaatcacttgaacctgggaggtggaggttgcagtgagccgagattgcaccattgcactccagcctgggcaacagaatgagactctgtctcaaaaaaaaaaaaaaaaagcaagcccaaggcaattatgaggaaaattccttgccattttccttgatctaaaatgtggtttgtctgagttttataaaactattgcacatttcttttgattagtgttagaatggcttatctttcttcatacctttttatttaatctattcacttctttttgtttgaaatgattttcttgtacacattactgaggcttgtttaatctactatgtcaatctgtgtctcttttttgtgtatataagtaacagacatttaaagtggtaattgatataattgtattaatatgtatatatgtaattgttctctgtttgttgtacttgttttcttctttctttctttcttttttttttttagacggagtttcattcttgttgcccaggctggagtgcaatggcgcgatctcagctcaccacaacctctgcctcccacattcaagcgattctcctgcctcagcctcccgagtagctgggattacaggcatgtgccaccatgcccagctaattttgtattttttagtagagacggggtttctccatgttggtcaggctggtcacaaactcccgaccttaggtgatctgtccacctcgaccttccaaagtgctgggattacaggcatgagacactgctcccggcctcgttttctatttttaaaactttctctttttctaccttctgtagtttttgcttgtttgtttgtttttttgagatggagtctcgctctgttgcccagcctggagtgtagtggcgtgatctcatctcactgcaaccttcacctcctcctgggttcaaatgattctcgtgcctcagtctcccgagtagctggtattacaggcgtgcgccaccatgcccggctaattttaataattttagtagagacagggtttcgccatgttggccacgctggtcttgaactcttgacctcaagtgatccatctgcctcggcctcccaaagtgctggcattacaggggtgagccactgtgcctggtagtaactttttcaaagtatgtttacagagatgtattccctgtcctctctagtcaatgaaggctctgttcctttaacttgtgttcatctagtgttttgagagaggtttcctgaatgctaggagctaaaataaaacagacctggccgggtgctgtggctcatgcctgtaatcccggcactttgggaggccaaggcgggtggatcacctgaggtcaggagttcgaggccagcctggccaacatggcgaaaccctgtctctactaaaaatacaaaaattagccaggcgtggtggtgggcccctgtaatcccagctactggggaggctgaggctggagaatcacttgaacctgggaggcagaggttgcagtgagctgagatcttaccactgcactccagcctgggcagcaagagcagaactctgtctcaaaaaacaaacaaacaaacaaacaatcaaacaaaaagaggcccaaacctgacttcttccaggctttgtggatggctttgtcgtgcagcattccttgaacactcggcctgagttttgtttgttttttttttttttttgagacggagtctcgctctgtcacccaagctggagtgcagtggcgtggtcctggctcactgccagctctgcctcccgggttcacaccattctcctgcatcagcctcctgagtagctgggcctacaggtgcccgccaccacacccggctaagttttgtagttttagtagagacagggtttcaccgtgttagccaggatggtctggatctcctgacctcttgatctgcccgcctcagcctcccaaagtgctgggattacaggcgtgagccaccgcgcccggccgactgtttaaaactctgcgttagcctccaatttctgctgaactgagcctagagatcagccagtgccgaaacttagggcctcctcaggttttttctagaaatgtgttatttcctgggcagacgtgaggctttctcaattccccaggataccaaagtgcttttgattagcctaatttctgaagctaattttctctccagattgttttcctgggtcttagatggtctattctgtctcagtcatagactgttgttccagatggttgcaggctttttgttgacaatatttttatgtagtccctgccaatttttgaccccagttaggctttagtgtagttgaaacagagaagagagccttatttcagacttttcgtaggcccaggagaaattggagtatatgaagataatatttgcaaataaatataatatttgcaaataagatggtagaataggtcaccgcacctggcctgttctacattttcacttacctttttctctttgttcatctttctgtcaacagtgtggtgtgttgaatattatagtttcaaaatccttcatgtgtgttaggtaagctgtcactttctggtttagaagatttttagcatttttagacatttgttacctccattagttttgtttaagtagcttttattgactactaacaggtctgttttaatgatttaaggaatttcataaatattcatgagagatgacaccttggtgacatgcagttcttttttttttttttttttttttgagatggagtcttactcttgtcgcccaggttggagtgcaatggcgcagtcccagctcactgcaacctccacttcccgggttcaaacgattctcctgcctcagcctcccgagtagctgggattataggcacctgccaccacgcccggctaatttttgtatttttagtagagatgggttttcaccatgttggccaggctggtctcgaactcctggctttgtgatctgcccacctcggcctcctgaagtgctgggattgcaggtgtgagcccctgcgcctggctgacaagcggttctttagaagaacgtgtacaatctttatccatctttcattctcctttgatgttacctagtatttaaaaattttcctttaggatgatgaaatacatttcattaaccttacgttacacttcattaaatttagtttacggaaaaccggttgccagcttccaggtgttctcttattgtaatcacatagaatgggctaaatcccccaagtaacaagtgttgacagaacatatgaaatgttacgtaccaaggtcactcagacacttagtacccagagtttttttttcatggccatcttagtctgttttatgttcattagaatagaatgcctgaaattgggtaatatacaagaaatgatatttgttttgtacaattctggagtttgggaagtctaagggcacggtggcacatctggtgaaagccttgctggtggggactcttcactatctgaggcaatggaagaagggtattcctaggggagggggtgctagcttaggggtctcttcctcttcttctgaggccaccagtcttactcccaggatatctcatttactcattaaccctttcatccatcagtgaatgaacccattcatgaggcagagccctcatgacatagtcacctcttcaaggccccacttttgaatactgacaccttggggataaagtttcagtatgagttttggaggggacaaacattcaaacctagcagtgactgatcaggtatgcttctctgctgattatatcacaaaatttcaaactctcagaaggatgatggaaattaagcaaataccatattatttacttatttatttatttttcaatttaatttgagacagggcctcgctctgtcacccaggccggaggtcagtgtcacactcatggctcactgcagcctctacctcctgggttcaagcaatcctcccagctcaacctccctagtagctgggactacagacatgcgccattatgcctggctaatttttgtatgttttgtagagatggggtttcaccatgttgcccaggcttgtcctgaactcctgagctcaagcaatccactcgtctcagcctcctaaagtgctggcattacaggtgtgagccactatgcccagtggcaaatatcatattgttttaataaatagttgaggcacacagctccttttctttgttatgctggtgcagctctccttaaatctagctctgagataccatcatagttcaactttctaaataaacgtgtgtagggatatgttgtcttagagctgctaatattgtctcttgtagacaacacatagtaggactttgtcacgagagttagtatagacccactagacagaaagacactagaggtgatctgggcagcatatctcaactccctgaaatcatgaatgagaggcttgtccgtattggctattactttactgaatgtgttcaattctagcatcagaattgctgtgctggagaaaatgagtatagacagaggataagagtctgatgaccaaatcattgaataaatgtttggagtctatagcattgtgtgaacttcctctagagtgtagcttcctagtgctgtcagcctgaaccttcctcctctgccatgtgggatgtttcaggactcaatgatctttgaggatgtggctgtgaactttacccaggaggagtgggctttgctggatccgtcccagaagaaactctacagagatgtgatgtgggaaatcatcaggaacctgatgtctgtaggtaaggatgacatcatttcttcacttagtcaattacagaacaagtgtttcttggtcatctacactgctcaatgatttgaaacatggtagggaatacagtagactggcctgatgcagtggctcacggctgcaatcttagcactttgggaggccaaggtgggtggatcacttgaggtcatgagttcgagaccagcctggccaacatgatgataccccgtctctactaaaaatacaaaaattagccacgcgtggtagtgcacgcctgtagtcccagctactcaggaggctgaggtggaagaattgcttgaacttgggaggcagaggttgcagtgagccaagattgtgccactgcactcaagccttggccacagagcaagactccatctgaaaaaaaaaggaataccgtaaggccgggcatggtggctcacacctataatcccagcactttgggaggccgaggtgggtagatcatgaggtcaggagattgagaccatcctggctaacatggtgaaaccccatctctactaaaaatacaaaaaaaaattagccgggtgtggtggcgggcacctgtagtcccagctactcgggaggctgaggcaggagaatggcgtgaacccaggaggctgagcttgcagtgagccgagatagcgccactgcactctggcctgggtgaaagagcgagactccgtctcaaaaaaaaaaaaaaaaaaaaaaaagaatacagtagacccttgaacaaagtgggtgtcagagactcttaacctctgcacagttgatgatctggttttaacttttgactctataaaatgttaactgttggccgggtgcaggggctcacacctgtaatcccagcactttgggaggccgaggtgggtggatcccttgaggttaggagtttgagaccagcctggccaatgtgaaaccccatctctactaaaaatacaaaaaattaaccaagcatggtgccaggcacctgtaatcctggctactcaggaggctgagacaggagaactgcttcaacctgggaggtggaggttgcagcgagctgagatcatgccactgcactccagtctgggcaacgagagtgaaacttcgtctcaaataaaaagaaaaaaagctaaatgttaatagcctattgttgactggaagctttatcagtaacataaccagtcaattaatacatattttgtgtgttggtgtgtatgtgtaagtgtatattaggacagtgtctcactttgttactcaggctggagtgtaggggcatggtcatagcttaatacaacttagaactcctggggtcaagcaatcctcctgcctcagactcttgagtagctaggattgtaggcaagtgccaccatgctgggctgatttttaaattattttttgtggagatggaggtcttgctatgttgcccaggctggtctcaaactcttagcctcaagcagtcctcccacctcatccctaagtgctgggattataggtataaaccaccatgcctggtctgtttggtctattatatatggtattcttataataaagtaagctagaaaaaagaaatattatcaagaaaatcataaggaagtgaaaacatattgacttgattaagtggatcatcctaaaggaatccttttcattgttttcacattgagtagcctgaagaggaggggttggtcttgttccctcagaggcagcagaggttgataaaagtttgcatatgagtggacttgtgccatgcaagcccattttgttcaagggtcaataatattttggtgaataagtcaggcatggtcacagtgtcccatgaacatagaatctaaaatgtttctataattttgtaatcatttatcatgacttttatgggtctacattttaggaataaaatgggaagaccggaacattgaagatcagtacaaaaattccaggagaaatccaaggtaatttgcacttataacatgaagctgtgtcccttgagataatgttagagtgataggaaattatatttatttacttatgtattcatgtatctgagacaaggcttaatctgtcacataggctagagtgcagtggcatgatcatagcttactgcagccttgaacccctggactcaagccatcctcctttcttggcttcccagaatgctaggattacaggcatgagccactgtgcccagtggaaatttaaagaacaagcaaacaaagtgaagcagcccagcttcaaatttgttaatttttagaatgttttctccaaaaatatatacttaaatacatacacattcattgtttgcaaaatagttgccttggaaacagtattaagaaatcccatagtggccgggtgcggtggctcacgcctttaatcccagcactttgggaggctgaggagggcggatcacgaggtcaggagatcgagaccatcctggctaacatggtgaaaccccatctctactaaaaatacaaaaaaattagctaggcatggtggtgggcgcctgtagtcccagctgcttgggaggctgaggcaggagaatggcgtgaacccaggaggtggagcttgcagtgagccgagatggtgccactgcactccagcctgagtgacagagtgaaactccgtctcaaaaataaaataaaataaaaaaataaagaaaccccatagtggccagatgtggtggttgatgcttgtaatcccagtactttgggagtctgaatgggaagattgcttgagcccaggagtttgagaccagcctgggcaatgcagtgagaactcatctctacaagaaataaaaaaaatcagccaagcctggtggcgcatgcctgtaggcccagctacttgggaggctgaggtgggaggactgtctgagcctggaaggtggaggctgcagcgagctgtggtcataccactgcattccagcctgcgcaacagagtgagaccctgtttcaggaaaaaaaaaaaaaaaaaaagaataagaaaaaagaaactgcctagtaacatcactgttttgataatagctgtaatagagcccctttgcagagaattcagtccactcactgtcagacacttcagacagaacataaagcctacatttctcatgataatgtaaaatatgcaaatcaaatgcttgctaatataaaattatttatcaacaaattctttgtaatgtgcttcttattttttatagaaatcatatggcagagagactctgtgaatgtaaagatggtcaatgtggagaaactttcagcctgattccagatggtataatgaacaagaacactcttcctggggtaaaaccatgtgaaagcagtgtgtgtggagaaggcaacgtggatcattcatctctgaattgctacatcagagctgacactggacacaaaccgtatgagtgtcaggaacatggagagaagccacataaatgtaagcagtgtgtaaaaaccttcagctgcctccactccttccaaacacatgaaaagcctcacacaggagagaaaccctatgattgtaaggaatgggaaaaaaccttcgattctccccaaaccgttcgaagatacagggtagtgcacagtggagatggaccttataaatgtaagttttgtgggaaagcctttgataatctcagtttatatctcacacatgaaagatctcatactggacagaagccatatgaatgtaatgaatgtgggaaagcctttggttttcccagctcctttcatagacatgaaagaatgcacaccggggagaaaccatatgaatgtaagcaatgtgggaaaacctttagttgttccagttccattaaaaaacatgaaagaatccacactggagagaagccctatgaatgcaagcaatgtgggaaagccttcgcttcttccaattcctttcagtatcatgaaaggactcacactggagagaaaccctatgaatgtaagcaatgtgggaaagcctttaattgttccagttcccttagaaaacatgcaagaattcacactggagagaaaccctatatatgtaaacaatgtggtaaagcttttagatttcccagttctattaaaaatcatgaaaagactcacactggagagaagccctatgaatgtcaggaatgtgggaaagccttcagatattccagttcacttcgagtacataaaagaattcacactggagagaagccgtatgaatgtgaggactgtgggaaagccttcagtcatcccacgacctttcatagacataaaattacccacactgcagagaaaccttatgaatgtcaggaatgtggggaagccttccgttatcctgttgcttttcgtagacataaaattacccacactgcagagaaactttgagtgtaaggaatgtgggaaagccttctgttatcacagttcccttcaaagacatgaaaggactcacaacggagaaaagttgtgtggatataaaaaatgtaaagccggctgggtgcggtggctgacgcctgtaatcccagcactttgggaggccaaggcgggcggatcatgaggtcaagagattgagaccatcatggccaacatggtaaaaccccatctctactaaaaatacaaaaattagctgggcgtggtggcatgtgcctgtagtaccagctacttgggaggctgaggcaggagaattgcttgaacctgggaggtggaggttgcagtgaaccgagattgtgccactgtactccagccaggtgacagagtgagactccgtctcaaaaaaaaaaaaaaaaaaagtaaagccttccactattccagtaccttctgaaaccatgaaagaactgacacttgagaaaaacaatgatgttaggaacatgggaaacctttcctttctctctcaatcgtttgaaggcatatggtgtgacatgctggcgatagacctcataactgtaaggaacatggaaaacgattcttgttttccatgctccttgtttattttagatacatgaaagaatttactctggagagaaactatgagtgtaaaaaatgtggtaacgccttgtgtagtttctgtttctctgaaatactgtcatgtcctggtattctcaggggattagttgcaggcaccccgctccccacttcagaacatctaaatctgaagatgctcaagtgctttatataaaatggtgtattttcctagaacctaagcacatcctcttgtacactttaaatcatctctaggttatccatactgcctaatgcattgtaaacgatataaaaatagttgtttcattgtgttatttagggaatgctgacaagaaaaaacatctgtagatgtttaatacagataaccatcacatgcccacctccatagtacaggcccacctcatagtatatgtcagctacaatgaaacattttcttttttttttaaaaaacgttttggattggtttcatttaatggcctcaaaaacacgtgttaacattctccaaatccttggttcttctctcctgataaccctcatgtgatgattgctctgtggttcctaaagctgcagtgtgttgaggtgcttagatatgtggcagtgtagataagtcaggggacatcagtttaacttgaattttctttttttttttttttgagatggagtcttgctctgtcacccaggctggagtgcaatggtgtgatctcggctcactgcaacctccacctcctgggctcaagtgattctcctgcctcagcctcccaaccagctgggattacaggtgcccgccaccacacccggctaatttttgtatttttagaagagatggggtttcaccatgttggccaggctggtcttgaactcctgacgtcgtgatctgcccaccttgacctcccaaagtgctgggactacaggaatgagccaccctgcccggccagaattttctttcaggacatcaggaggatcctctgctggaagaaccaacatctgattgcagatgttgcctctttggtggaaggtcagtaacacaaatcttggatctgtggtgtttgagggctgaaaatatttaagcatcgaactttcagtcctttttttttttctttttttttgagatggagtctctgtcgcccaggctggagtgcagtggcacgatctcagctcactgcaacctctgcctcccaggttcaagcgattctcctgcctcagcctcccaaatagctgggattacaggcgcacaccaccatccccagctaaattttgtatttgtagcagagacagggtttcatcatgttggccaggctggtcttgaactcctgatctctgatgatctgcccaccttggcctcccaaagtgctgggattataggcgtgagccaccgcaccctgctgaagtttcagtcttcataattgcagatgctttagttggaaacgttgtcataggaaaagctgttttttctttctctttgaatcatcaaacacatcttgcaatggttttggccatgttatctctggtgacctggaagcgactttgatattaagcttcagagtatgctgaaacaagtcaagacttttggtgatgttaggatggtaagcatgtattttgcatgtgaggtcataaatttagggagcaggtagaaaattattgctttatttgtcccctgaaattcatattattattatttttttgagagagttttgctcttgttgcctaggctggagcgcaatggcacaatcttggctcaatgcaacctccacctcctggtttcaagcgattctcctgcctcagcctcccaagtagctgagactgtaggcatacgccaccgtacccggctaattttttgtatttagtagagacagggtttcaccatgttggtcaggctggtctccaactcctgacctcaggtgatccatgcacctcggcctcccaaagtgccgggattatagagatgcgccaccacgcccagccctgaaattcatattttgaaaccttactccctaatgtatggaatgaggagataggatgcctgggaggtaattaggattacttgggatcatgagggtagagttctcaggaatgggactataaggttccctagagagcttgcatttgctctctattatgtgaggacacaatgagatgaaagccttctttgaacaaggaagcttgcccttaccaggcactgaatctactatcactttgatcttggagttcacaatctcctgtatactgaggagcaaatgttaggtgtttaatacacccagcttatgtcattttgttttaggagcccctggtggataaagcacaaccccattaaaaaataggtgaaggagttgaatagacatttctctaatgaggatgtacaaatagacaataattacataaagaagatgttcagcatcactcatggtttagggacatgcaaatcaagagcaaaatgacatctatatcccctcaccctcattagtttgcttctgtccaagaacaaaataacatgctggcaacgatgtggaatagtgaggacccttgtacactattgatggaaatgcaaaatgtcacaactacttttgaaaactatatggcaggccgggtgcggtggctcatgcctgtaatcccagcactttgggagcctgaagtgggcagatcacctgagattgggagttgaagaccagcctgaccaagatggagaaaccccatctctactaaaaatacaaaaaaattagccgggcatggtggcccatgcttgtaatcccagctactcaggaggctgaggcaggagaatcacttgaacccgggaggcggaggttacagtgagtggagatcgcgccattgcactccagcctgggcaacaagagcgaaagtccatctcaaaaaaaaaaacaaaaaaacaaaaaaaaaaacaactgtgtggcaggtaatcaatacattgaaaaaatggaaataacatccaccatttttcccttctgggaatataagcaaaagaatagagacgggggcctgaaatgggtatttgtatacatggtatagcagtataacttaccaatagggaaaatgtggaagcaactctcttgtatattgacagatggatgaataagcaaaaggtagtatatgcataggatagactattactctgccttcaaacggaagggtgacctgacaaatgctacagcattgatgaacttggagcacattatgctaagtgaaatagtccattcatataaagacacaccttataaggtcgagtcacttgattttttacaacctgtctccagacatgggctccttaaactccagacccaaaatgtttttgcttatatgaggtactcagaggagtcaaattcataaagaaagtagaatggtgattgtgtggaataggggaagtgggtaatggagacttatgatttaatggcataaagtttcaatattgcaagatgaaaagggttctggagatagatggtggtgatggctgcacaccaatatgaacgtactgaaagccagtaattctacacttaaaaattaagatgggccgggcacagtggctcacgcttgtaatcccagcactttgggaggccgaggtgggtggatcacctgaggtcaggagttggagaccagcctggccaaaatggcaaaaccccgtctctactaaaaatacaaaaatgagctgggcatggtggtgcatgcctgtaagcccagttactcaggaggctgaggcaggaggatctcttgaacccgggaggctgaggttgcagtgagctgagattgtgccactgcactccagcctgggagacagagcaagactccatctcaacaacaacaacaaaaaattgttaagatgataaattgtattttttctgtattttagtaccattaaaatacgtgggattggtcagagtggtggatagggaaaggacgcaaaccttctgagaggttggaaggttctgcagagccctgggggagaatagctgaaggtggctgttctataaccctgaggcagagggcatggagtaggtacaagggagtgtgggggaatttatcttaaacaggcttgtttacttgtgttgaccaggaactgacctttcatcatccctgtgcctgacgttccctgaaaggggaacaataagtgttaattacctacaggttgtgttggctccaggtttttggcattgtgcctagactgaataaaagcaagcagctccagcttcttggggctgctttctggccactagagccaggcagtcacctagttgctgttacactgaatacctgtgtctgagtcctcatttcatccgttggccagggtctgcaggacagacccggcattaaaagagtggggagccacagtagtgcaaagaccccactggaccaccaacataccaagcagttcttggttcaatccctccttgtcctcaacactgtttttccattttccttgtccataaaggacctgtttccacatgcttgctttgactctgatgtcacctttagagttgatgctcaggcatagctcacttaactgcctcaccttttctctcctgatctggttgttgatggctgttgtgagacattggttgttgcctttttagtttaaaaggattcaaatgacacacagcaatggagatgcagtatatggcaatttattgcaaacgaaaaagtattttgaaagttaagtgcagaacagacagtatgccctgagagagagaggaggattcagggcaggctgctcataaggatgagacagcaaacagtggcactagggagactttttaaaaaaattttaatagttagatttcagctcttttgagtggtttcaagtctgctgtggaggaagggggtagggggaaggtgggcatagcccgagaggcaacagactccagaacattccagacacagtccttcagaggctggctagtattaaggaaagtggttaggtttgtgaggtgaaacagtggatgcttgtggcttttccgcagtgtgtgcagtcaggccagcttgacttggaggaaagccattcaacacaaaaatggcaccacagttaccctggaggtaactgtgaagcacagggtttgagccacctccatcatcctcagggcactgtgtgtttcaggatactctgtggcactgctttcttttcttttcttttcttttttttttttttttttggacggagtctcgctctgtcgtccaggctggagtgcagtggtgcgatctcggctcactgcaagctccgcctcccgggttctcgccattctcctgcctcagcctcccgagtagctgggattacaggcgcccgccaccgcgcccagctaatttctttttgtatttttagtagagacgaggtttcactgtgttagccagggatggtctcaatctcctgaccttgtgatccgcccgcctcggcctcccaaagtgctgggattacaggcgtgagccacagcgcctggccgagagactccttttatgggaatcttacatgattattcataaggggctgggaagaggtgttactagtaagcacattctgggtggtcttctgggtgcacatgcacagtagctgcccattcttgttcatacgtcacatctcattagcatcttaaatctccacccagggatgtggtttttactattataatgagcaaagggtcaatctgaagacaggtaaaataaaaatacgcgtgctccctacaggggaaattccctactggagagagctttgcttgaatgagcttgactacaatgcgaatgctgaggcttattgtgttgactgtacgattgccaagtctccaggacatggttacttccttggctacctatcctgtctcatggtcctcagtcacttcacacccatgatgtatgctaacacccttcggttatctgtttagaagggataattattatttttttctttttgagacagagtctcgctctgttgccaggctggagtgcagtggcacgatctcagctccctgcaacctctgccttctgtgttcaagcaattctcctgcctcagcctcccgagtagctggaactataggcatgtgccaccatacccagctaatttttgtatttttagtagacgaggtttcaccatgttggccaggatggtgtcgatcttctgacctcgtgatccactcgcctcggcctcccaatgtgctgggattacaggcatgagccaccgcgcccagtctagaagttataattttaactttccctgaagaacactcataaacataagttaaggattgcaatgttttgttcatgaacaaatcttccagactgtgagaattaagcaagataaactgaaaataataataatgcgatacagattttcctaactacagaaaattgaggaaacatactacaaaatgtggaatgactgacctttaattctacctgggctggaggttcaagaaatggacagaaggggtcactacatgcacaggaaagaatttcctaattttaccagtagagctgatgttgaaggagaaatatgtgctgtaacaagagaacttcaaagtaggatgaatgaaggaaatcttacccccctaataatatggaatttatgcagaatcaatttttacttcagaaggtcagtaaattctgctttcatccaatgtctttacatgtagaattatttttcattatcattgttcttaccttttgtagtgattactctgttgtttatcaagtaaatgataacccgttaccatcagcatcacttttcttgtgatatatagctaactttcagtgatgtacaaaaatatttatcaactatagctttcatatttttgcattcttggggtattttgttacatgtataacaactcttgagattccacacataacaatacattcttaggattattactttgccattggtagtcactgggtttgtccacttcctgtatggtgttatttgcaaatgaaatacacacatactacatttttatatgtggtaggtccaacaacctatcaactgattattttacaggtgaagaaatacacatttagtctgtcttttatagttataatattctttaatagtcatctttgttttctcttgttttttgccatcatttgatgtcagactgaagaactttctttggtctttcttgtaaggcttgtgtgctggaaataagttctcttagtatgtatgcttaaacctgggaaagtctttgttttgacttctgatttgaatgtgagctttggtggatatagaaatgttctattatatatgtttcagagcagaggaatagcatctaactaaaagcaaatatgtctatttcacccaaacacttatcattacactagtttatataagttaatgtcaaaaaacaatgagcaataaataggaataggatggaagaaggaaatattgtgattgaagatgaaaccgttgtttgggaaagtaaagacaaaacaactggaaaaaaattttaagctggggaaggaggcaatttgctgtgtatggagcaaacatactattgaattaaaatcacatttcttgaaaatgtatattaatttctaagaatagcactaataccctatgccgtatctgtggaaaggtatgagtatttcctgatgaaatgacctgagtgtcacctctatagatttatatataactttgatggattgaaggttcctcatcccagtcctcactgtagagaaatggtttaaatataagtaattcaggaatctgatccaaattaactcgtgtataatattccagaaaaattcacaacatcaaagaaatgttttgaaatttatacttttttttctgacagagggcctcactgtgtcacccaggctggagtgcagtggtgtgatctcacctcattgcagccttgacttagtggactccagaaagcctcttgcctcagcctcccaaatagcagggactacaggcataggccatcacacctgactcattttttaattttaatttttttttttggtagagacagggtctcactatgttgtccagtccaggctgcctcaaacccctgggctcaagcaatcctcccaactcagcctcccaaagtgctgggattataggccattgctcccagcttattttttatttattattattattattattatttttttttttttgagacagagtctcactcttttgcccaggctggagtgcagtggcgctatctcggctcactgcaagctccgcctcccggattcactccattctcctggctcagcctcccgagtagctgggactacaggcgcccgccatcgcgcccgattgaggttttgtatttttaatagagacagggtttcaccgtgttagccaggatggtctcgatctcctgacctcgtgatccgcccacctcggcctcccaaagtgctgggattacacgcgtaagccaccgcgcccggcctatttttaattttttttagtcatggtttagcttgatcacccaggctgttctaaaactcctgggctcaaaagatccttcccgcctcagcctccctctggggtagctgggaccacaagtacttgccaactcacccagccttttattatcagtgcctaatgcttaaggaggatgtgggctaccttttactttcagataaaaaacattgaggtgagataattctgttaattttttttaacacaaaggttcataacttgaataggtagtttcttgcctaaatcatttaattaaaaaatttcgttttcattttgtagtctcttggatcttggagttgattgaaatgtatttttaatagccaagtagattcacttttatatggttttaaaattgttgtgtatataaggggcatttgaaacattagatttttgtatttgctgtgactttcctactggccagtgtgccaggtaccggatatcctccgggaactgcaggcaggcccgtctctctttcacgggtgagagccgcagcctactcttggcggaagcggaaaccctttcctccatcacgtttcgcccattccaggccagaagcaggccccgctccttgctgctcgcctgtgagcatatttcgtcgaatcccggctgggcggcttggtcgcagtgtgcctgtgctgggcccggagcgcgttcatcgcccacagccgctccagttcttgcgagtggttgttcctgcacgccaggagccgtgggccgggccatcaggccatacaagtgctgcgaaagcggcctcgccttcggctgcatcatctcggggatgtttcacttgtctcttctcccagttccagccccagcccctcgaactcaccgggtctccacagcacactctgatcaatatcccacaggtgaggaatataaaatactctttataaagtggaagctagtaagtcgttcttttcaaactttcacaagaaactacagatctttttaaaagattctgattcagcaggtcattggggaaggcctgatcctctgcatttctgactcggtccccagtgtcgtccatgctgctggtccgcggaccgcagttagagtgctgaggtagtaatagacctggttaggcaggcaggcaggcaagggactgatcccatggagcctggtgggccgtattaaggacttttattggatttcgagcagagaagcgacgtttgggttgtgttttaagaagctacagaacaagttctgccaaagtggaagcaaagacaggttacccactcctcttttgcctcctcgcctcttgcctcgtcgcgggtgagctatgactatctggggcagtggtgcgccgggggtaaaagtatttaccaagacaattgtaggtaaaggaaggcaggtttatcggagaaagtatgaaaattcgttgcgaggcagcaacaggcaggtcagcagaagagaagctgaatgcagggaaacaggcttgctgaggattttatggactggaactttggctgattgataacgccaaggcagcagggggctaatttgcatttttctggccgctgtggtgtttgataaattgaagcgtttgttgataagcaggaagtttgagttatgtatgttatctgagcaggagggccatatgtcctgggccataaagcagacctataacttatctgcctctttttgtttatatgtcctggaccatgaagaaaggcagatttgtagcttatttactttatctctttgctttctgcggctctcgccagcctgatttttttctcccctaattaggactctgcgtgcctgattgcttttctctgccttccttacttgcaactcccaaggtcatgtgtccgtgagagtggacctaactcagccgctaactcagcctcgagctacacaaaaaagggactggactgggctaaggcttcaaaaaagggtgggccttgggtaagatgttccagctggtccagcaccctcctgtcccatttcccaggccctggcagtccagaattgagtaaaacatactgagataaccctccactggtgaacctggaggaagatccatcctgtaggaggtgagagcctgggaaaggacatcactatggagggaactgaagttggggtggaggtcggtggatggggtattggaagtggcttgagaccaggagatgagtttaaagtcctcaggtgcctgtgggtaaagttctgacaaaggaaccaggaagaaataagagtcagatgatgaaaaggatcaggactgggggaaaaaacaaggacccaacctggtgatcgggattaaacaattattctgggcaggcaagggcaagaaatagataataaactggaaaaagaaatcgctggtgtaggagggatatcagctgagaagagttggtccaaggctcttggtctacactccacatcctgtggggtgcacctggtgggcaactaggagagaagaagggcccgacgtccagtaagggaatcagaatgtgaatgccgtattgctgtggggaaggatcacaggccacctggagccacctaagtgaaaaccagggtcagtgcctggggatggaaggatctgaatggaaactcacttaaggccaggtggggtgacctgagtagcaaacaggtaaaagttgggtaggaggacctgatttggatggggctgctcactgtgatgtctatgaagctatcattccagctgctgtccacctaggagcagttggtcagtacagtcagctgcgtgttcccatcttgtgtatgagggcagtactgaaggctgcccttcatgcctgccttgatcactggcaggagacagaggacgtggaagtatgggttgtttggggggatggtgcctatgaggaaggtctgatcccaaatctagagaatgggagggtgggatgtatcatggagggtcaggccgggggtctggaggatatcatgtcctaaatgcagatgttctctgggtctcaggtccctgctaccagcccagcctggtgaggctccagatgagtcaataaccctggctcaggagagctggtgtaggatctgttaggccaaggggtctggcttccttactacctcccacttctacctctgtagaaatgtctgtctccagcatcatgtcaaagcaactgatgacttccctaccccaggcatcactgagctaaactgggtggcaggaaggtgatcaccacctaagtactatctttttttttattttgtattttgagacagagtctcactgtgttgcccaggctggagtgtagtggctccatcttggctcactgcaagttccacctcccaggttcacgccattctcctgcctcagcctcccgagtagctgggactataggcgcccgccaccatgcctggctaattttttgtatttttagtagagacggggtttcaccatgttagccaggatggtctcgatctcctgacctcgtgatccacctgcctcggcctctcaaagtgctgggattacaggtgtgagccactgtgcctggcccacccaagtagtatcttatcccttctctccttttcatcccagcctgtgcccactgatcgcttggttaccggtcccattatccactccagctcctggtacttctcttctgggtacagctgaaccacctgggaagagcaagctaagaagttctggtgccccccttgcagcaaggctatcagtgggcacaagaggatggggggatgggctggagtaagccctacccagagcaggagggagccccacacagttctccctcagctgttaacttcctagagacccacctcacagtcaagagcaccaacgggcactcctccctccactccccttactggggcaccagtttctttccaccccaggtgttcactatccccgttatttcaattctcatggctcacaggaagaaataggtatattgtactgagatttttctttctttttttttttttaaaaaaaaaagacatttattcagcatcacgatcagactattacatttagcaatcaacagcatggggtgcaaaaagaaatctacgttaaaaccctttgttggaatgctttacactttccacagaacagaaactaaaataacctgttatacaattagtcacaaatacagtcctcgagttttttgcccatacacatgagtatttgtctaaaacatgtcttctttgtagcagctaggccctgccaccactgtgcttggctgagttcacaaatctattgtaacctgtagcttccctgtcacttctctggctctcctctcctgctaagctttgtttcctaattaaaatcttctgccactgccatagctactgctgctgctggaaccgccatagccacttggtttcgtggttttgcaaagtattggcctccaccgccataggggccagagcttctgcctccaaaatttcctcccttcatgggtccaaaatttgaagactgattgttgtaattgccaaaatcattgtagcttccaccacctccaaaattgcttccatcattaccaaatccattatagccatccccactgccaccatatccaccaccaccatggctgccaccaaagccaccacgaccactgaagtttcctccacgaccgaagttgtcattcccaccgaaaccacctccacgaccaccaccaaagtttccagaaccacttcgacctctttggctggatgaagcactagccatctcttgctttgacagggcttttctaacttcacagttgtggccattcacagtatggtatttctgaatgacagtcttatccacggagtcatggtcgtcaaaggttacaaaggcaaagccccttttcttgccactgcctcggtcagtcatgatttcaatcacttcaatttttccatactgttcaaaataatctcttaggtgatgttcttcagtgtcttctttaatgccaccaacaaatatctttttcacagttaagtgggcacctggtctttgagaatcttctctggagacagctctctttggttccacaactcttccatccaccttgtgtggccttgcattcatagctgcatccacctcctccacagtggcatacgtgacaaacccaaagcccctggagcgcttggtgtttggatctctcattaccacacagtccgtgagcgttccccattgctcaaaatggctcctcaggctctcatcagttgtttcaaagctcaaccctccaatgaagagcttcctcagctgttcgggctctttaggagactctgacttagacatgacggcagggtgaagagagactttaacgatgcttcttcggcggtgtccacgggcagaaaagcgagatttttctaaatgacataaaaatatgtattcgtgaaacagtcttttcaagataaggatcccatccatcggactcaaacattacccgctggtccttggtaatcttgccccaccctagtgcttcttctctctcagccacccctgatggaatcctgcagtttgtactgttctgtgtcaggcatctttcactcagcataattgagcttcatccaatagttctttattgtacatgaataatattccatcttcagaggaagcaaaatttatttctccagctgttgatggatatttgggttaatttcagtttttggctattaagaattaaacatatgaatattcacataccagtgtttgtaagaacatatgatatttcttttttgtttgtttgagacagcctcgctctgtcaccaggctgaagtgtagtggcgcaatcttggctcactgcaacctccgcctcccaggttcaagccattctcctgcttcagccttctgagtagttgggactacaggtgcgtgccaccacgcccagctaatttttgtatttttagtagaggtggagtttcactatgttggccaggctggccttgatctcttgaacctcgtgatccgcccacctcagcctcctaaagtgctgggattacaggcatgagccactgtgcccagctgattatttctttagaagattttattttattctacctaggaataaaatggctgggtgttgtgacaggtgtatgtttaacttcttaggaaacttccaaactgttttccaagtggctgttccattttgtattcccaccaacgtcataagagttccagttgcttcgcattgtcaccaacatttgatatagccaatcttactaattttagactcccaaatatgtgtagtggtattagaattgtggcttaatgccaggcacagtggctcacgcctgtaatcccagcactttgggaggccaaggcgggcggatcacgaggtcaggagatcgagaccatcctggctaacacggtgaaaccccatctctactaaaaatacaaacaattagccaggtgtggtggtgggcgcctgttgtcccagctactccggaggctgaggcaggagaatggtgtgaacctgggaggcggagcttgcagtgagccgagatagtgccactgcactccagcctgggtgacagatcgagactccacctcaaaaaaaaaaaaaattgtggcttaagtttgtgtttacttaatgaatgatgatgttgaatgatatttcatgtttttatttgtcactgaaaaatattctgtggtcaagtattaatgacattgattgttttcagattattagtttttgagagttctttatatattctggatataattgctgcatcagattatggtttgtatgtattttctcccatctacggctattctttaaaaatccttagcagtctctaggccgggagtggtggctcatgcctgtaatcccagcactttgggaggccaaggcgggcagatcacttgaggtcgggagttcgagaccagcctgaccaacatggagaaaccccatctctactaaaaacacaaaattagccaggcatggtggcacatgcctgtaatcccagctactcgggaggctgaggtaggagaatcgcttgaagctgagaggcagaggttgcggtgagccgagattgcgccattgcactccagcctgggcaacaagagcaaaactccgtctcaaaaaaaaaaaaaaaaaatccttagcagtcttatgcctataattccagtactttgggaggccaaggcgggcagatcacttgaggtcaggagttcgagaccagcctggccaacatggtgaaaccccatctctactaaaaatagaaaaattaaccaggcatgatggtgtgtgcctgtactcccagctacttgggaggctgtggtgggagaattacttgaacctgggaggcggaggttgcagtgagccgagatcatgacactgtactccagcctgggtgacagagcgagactctgtctcaaaaaaaaaaaaaaaaaaaattccttaactgtatccttcacaaagcaaatttttattttaatgaagtttaatttctcaatttttaatggattctgcatctttgtcatatgtatgcaattgtaacgtaacccaaggtcaaataatttcacccacattttctttacattttatagtttagattatacattcagttttgtgatccattttgagttaatgtttgtatatagtgcaagacacagatctacagtctttactttttgcatatgcatattctattttttagcattatttgttgagaagagaaattttgactcaattgttcactttgattaaaaaaaactactggaccacatgtgtagaaatgttactggaacatttattctgttccatggatatatttgtctacttgccaaagacattgtcttgattaggattgctaaattttctttgtttttttttcagaattatttggctatttgtttggttatttcaggtacttttcaccttttttttttttttttttttgagatggagtttcactcttgttgcccaggctggacaacaacgacaacgcgatctcggctcaccgcaacctccgcctcccgagttcaagtgattctcctgtctcagcatcccaagtagctgggattataggcatgcgccaccatgcccagctaattttgtgtttttagtagagatggagtttctccatgttggtcaggctggtttcaaactcccgacctcaggtgatcctcctgcctcggcctcccaaagtgcttgggattacaggcatgagccaccacgcccggccttcatcataattttataacttcataatacattgttctttttctttttcttttttaaaagattcaatgattttttttaaagcaataaaaaatagtaaaaaaccctttgtgtttactgaagtggttatcatttctggtcctcttctttctttccggatttccacttggcttcatttttctttgcacccatgcagtttagggatgtctcttatggagcaagtatgctgattacaaacactttcactatggctgaattaataatttattttcccttcatttggaaagatattgtttgctggatataggattctcagttgatatacttgttctttcattactttaaggtagttgttctatggtctcctgatctgcgctgttgctggtaataagtatgtaatgaatcctatctttggttcagtgtagttaatgtgtctttttcctgttgccttaaagctattttaattgttcttgctgtgaagtagtttactgatgatgtgcttggtgtagatttatatacatatatgctcatggtttgttgaacttttttgatttctgggtttataattttcatccagtttggcaaatgtgaaaccagtatttgttgaaatattttttgtcatgctctttcctctgccaaagagtcttgttatttgcatattatgtcacttgtaattttcccactacacagctcactgattttctgttttttgttgttgttgttttttttgctgggtgcttcatttgggatagtttctactgctaggtcacaaggttcactcgtcttcttctctgcagtatctgatttgctgtttattccactcagtgtaatttgttatcccagatgttgttttcatgcctagtagcttgaatcatgtttttttctttagtttttagattgtttggaggtaaaatatactaacagagaatttgccatttcgatcatttttaaaatgtgccatttagttgtagtaaataaatttacgatgtggtgtaaccaacgcagctattgatctctagcattctctcatcactctaaacagaaattgggtactcattaaacacgtccccagtctcccttccccccagctcctgataatgtctatcctactttctctatgaatttggctattctaggcacctcatataacgggaaggatacaatatttgtccttgtgctgggcatggtggtttatgcctgtaatcccagcactttgggaggctgaggcaggcagatcacgaggtcaggagttcgagaccagcctgaccaacatggtgaaaccccgtctctactaaaaatacaaaaattagccaggtatggtggtgtgcacctgtaatcccagctactcaggaggctgaggcaggagaatcgcttgaacctgggaggcagagattgcagtgagccaagatcacaccactgcactccagcctggatgacagagtgagactctgtctcaaaacaaaacaaaacaaaaaatttgtccttgtgtgtctggcttatttcacttagcataatgttttccaggttcattcgggttgtatcatgtatgaggaattcattgctttttctgtctgaatgatacttcattgcacggagaaaccacactttgtgtgtctactctaaacacttttctttttttgtaaagattttaaaaatatatttaaaaactagtttgagagtaattgaattaaatcattgactggaagagttgtttctacagtaatattttggctactgtgaattaagatggctatgaaattggtatacatgtgtctgtgtaagaccctgcttttacttcttttgggtatatacctagaagtggaattgctggtgtaaagagtaatggatgtttcccttttctttttttcttttttcttttttttgagacggagtcttgctctgtcacccaggctggagtgcagtggtgcgatcttggctcactgcaagctccgcctcccgggttcacaccattctcctgcttcagcttcccgagtagctgggactacaggcgcccgccaccaggcctggctaattttttgtatttttagtagagacggggtttcaccatgttagccaggttggtctcgaactcctgacctcatgatccacccgcctcagcctcccaaagtgctgggattacaggcatgagccgctgtgcctgtcctgtttttgtttttgtttttgagatggagtttcgttcttgctgcccaggctagagtgcaatggcgtgatctcggctcatggcaacctctgcctcccgggttcaagtgattctcctgcctcagcctcccgagtagctgggattacaggcatgcaccaccacgcccggctaatttattttgtatttttagtagagacggggtttctccacgttggtctggttggtctcaaactcccgacctcaggtgatccacccacctcggcctcccaaagtgctgggattacaggggtgagccaccacacctgaccttccttttaaatttttaaaatgtttgcttcatatattttgggcctctgttatttagtgcaattatatttataactgttatatattctgtatgatttgagccttttatagtgctcttctttgtgtcttttaacagtttttgacttagtctattttgtgtgacaattgtatagccacccctgctctctttacattactatttgcatggaatatctttttctttcattctctttcaactgacttgggtattgagatctacaatgaatgtgctgtagacaggatacaatttgatcatattttaaagattcattctccctgcctctgtcttttgtttggcaagtttattccatttaattaccgataacgaaggcattatgtctgccattgtactattcgtgttctgtatgactaatagctttgtttttcataaaatacgaggaattccttatgttttcaaaatcagtgtctagtttcttggcttttgattggaaacttttattaacacttaaaggagggagcatagccacactctgcagaggggacaagagggcaagttgaactcccagagctgaatccttatgtatcttgcctcatcaccatgacttggtaatgaggcagggacactctggggacccatttctttttcttatcttttttcttttttgagacagagttttgctctttcgcccaggctggagtgaagtggcacaatcttggctcactgcaacctctgtccgctccccccgccgccccaccccgggttcaagcgattctcctgcctcagcctcctgagtagctgggattacaggcgcccaccatcatgcctggctaatttttgtatttttagtagagacggggtttcaccgtattggcaaggtttgtctcgaactcctgacctcaggtgatccatccgcattggcctcccaaaatgctgggattacaggtgtgagccaccgcacccggcctctggggacccatttcaacagtctggcacccatggttgggaatatgtttaacctctaaattggggttttcctgctgaactgcgtctgaaagactgcttctctgagctagctcatgtttttgctttttctctctattgattcctttatagaatattgctgtcatataagtccagcttttccgtgaatttaacagttttatcctgttatcgatgtgtttttattttcttgaaaataagcagattgagacatcagatgggagaaaggcttgactatgtcgccagcagcctcatgccaaattcctgattcctggaggacagagcccccctcctgctccaaggccaggagatggcgccactggacagtgagtctgggattcctagcacacacttgtgattgctggtccaggaaaaagaagcaggaagggccattagtacaatcagtcaggaaattctgcttaagtgcacatttctccccaggagagtcgggtcactgcactgggaggaagcccgcctgccaagggctgtgtctggaacctgttcatcgcgctccactcagcacagtgagatcgcctcttctgttactcggtctccagggggcgggacctggagccgtatccaatcagggccatggggtggggtcgtgagaactgtggatcaggcgcactgcagggaggtgggtgcgcggcatcttcacccctctaaatgcggctcctactctgtagctgacagacacccacagacgtgtctgtagcatcctctgtcacactgggacccgtactggcagcaggagccgtagggaggactgggacacctggaagccaggaattggtgagtgtgcggggctgagggtcccgagactaggatgggactggttggaaccggcaggaatagaccgtggcgggacccgggcctcttcgtagttgactctgggttctgagacccaagtccccctggcgcacctcggccctggttcctctcaggccgcagggtggggctgcgacggcagccgagacccctagccgtccggtccagtccctgtgcaactgactgtggccccaggcccagcgccctctctggtcagctccgcgcccgctgccccagtcacgcccgctgcctccgtgtctccccagattgtacgggggccactagagggtcatgggggaaatcctgcctcgagtatggggttcgtgtgagaggagctgtaggctgtggggtccccagttccctctttctcaccaggggcttttgtattttatctgagtttcccaaatatacgcgaagcagggtctcaaatccgcgactgtggtccctaggctaccttctcctaaggctggcagcaaatttgggatttcctgatccctttccgcattttataacacggatttcctttagttcacaacagtatcacttcttcgtcctccaggctatgtttcaaacacaggcagtattttaatcgtcatttttttagagggcagtatatggccgttttaaaaatatttgttttgtgtttgtgaacgtttcagagaaaaaccacctgacactccgctgtaaacaatctttgtgtctctttttatctgccctaggcacagacaccttctgagaatgtcttgggttgagattcccctttggaaactttacagtgatgcgacctcagcccaccctctgccttttcctgatcctgggtttcaggactacctggggctggcccaagatgcctacagctgccaagtctcttgggaaagtctagtgaatatcagcccctaggtcgttcctcccaaagagcctgaggtgtggcggtgaggcctccccagggagcagctggatgctatggggtgggaccagtctcctatatcattattgtaaaaaactaatcccttgggacacgccttttcttctccaacccgtttccattccttggggacacatggctagtcagccaatcaaattctggtatggaggaaaccaaattatttctgtcctgtaatcctagcactttgggaggccaaggtgggtggatcacctgaggtcaggagttcaagaccagcctggccaacatggtgaaaccccgactctactaaaaatccaaaaattagctgggcgtggtggtgcacccttgtaatctcagctactcgtgaggctgaggcagaattgctagaacccgggaggtggaggttgcagtgagctgagattgcgccactgcactccagcctgggcgacagggcaagactccgtctcaaaaaaaaaaaaaaaaaaagaagaaatgatttctgtcctctggattctctcagtctagtgaaagaagaaaaccacccccaatgagttgttgcaaggacctgaaaagcacacagttgagtgtcttctgggagggtggtcactgagcacttcagggagcagcttggaggtggggggatgtcccaagtgataggatgatgtgacctgacacttgagtcagacacttgagtgtttcaggtcagcactgcccctccctgggtttatcaccttgaaaaaattggtttactcatttcagcttcaggtttttttttttttttttgagacggagtttcactgttgttgcccaggctggagtgcaatgacgcgatctcggtttgccgcaacctccgcctcccaggttcaagtaattcttctgcctcagtctcccaggtagctgggattacaggcatgtgccacaatgcccacctaattttgtatgtttagtagagatggggtttcaccatgttggtcaggctggtctcgaactcccgacctcaggtgatctgcccacctcagcctcccaaagtgctgggattacaggcgtgagccaccatgcccagccatcagcttcagttttttttttttttttcttttaggattgcttttatgagctaggcatatttgtatgggaagggggaatttttttttctttttttagtatttatttatcattcttgggtgtttctcggagagggggatttggcagggtcataggacaatagtggagggaaggtcggcagataaacagttgtgaacaagggtctctggttttcctaggcagaggatcctgcggccttctgcagtgtttgtgttcctgggtacttgagattggggagtggtgatgactcttaacgagcatgctgccttgaagcatctgtttaacaaagcgcatcttgcactgcccttaatccatttaaacctgagtggacacagcacatgtttcagagagcacggggttgggggtaaggttatagataacagcatcccaaggcagaagaatttttcttagtatagaacaaaatggagtctcctatgtctactactatctacacagacacagtaacaatcttatctttcttttccccacatttcccccttttctattcgacaaaactgccatcgtcatcatggcccgttctcagtgagctgttgggtacacctcccagacggggtggaggccaggcggaggcgcccccccacctcccagacggggcggctggccaggcgggggctgccccccacctcccttcctcctggacagggcagctggctggtcgggggctgccccccacctccctcccggacggggcagctgccgggcggagaccctcctcacttcccagacggggcagctgccaggcagaggggctcctcactttcccagacagggcagctgctgggcggaggggctcctcacttctcagacggggtggccaggcagagacgctcgtcacctcccagacggggtggtgttcaggcagagacactcctcagttcccagacggggtcacggccgggtagaggcgctcctcacatcctagacagggcagtggggcagaggcgctccccacatctcagacgatgggcggcaaggcagagacgctcctcacttcctagatgggatggcgccgggaagaggcgctcctcacttcccagactgggcggcagggcagaggcgctcctcacatcccagaccatgggcggccaggcagagacactcctcacttcctagatgggatggtggccgggaagaggcgctcctcacttcccagactgggcagccgggcagaggggctcctcgcatcccagatgatgggcggccaggcagagacgctcctcacttcccagacggggtggcggccgggcagaggctgcaatctcggcactttgggaggccaaggcaggcggctgggaggtggaggttgtagcaagcccaggtcacgccactgcactccagcctgggcaagattgagcactgcgtgagcgagactccgtctgcaatcccggcacctcgggaggccaaggcgggcagatcactcgcggtcaggagctggagaccagcccagccaacacggcgaaaccccgtctccaccaaaaaatacaaaaaccagtcaggcgtggtggcgcacgcctgcaatcccaggcactcggcagtctgaggcaggagaatgaggcagggaggttgcagtgagccgagatggcggcagtacagtccagcctcggctcggcatcagagggagaccatggaaagtgggagacgagggagaggctcagcatcagagggagaccgtggaaagtgggagacgagggagagcagcttcagttttttaataactgtaaaatgcactatattattagagatggatggagaagttaaagtatttccaaacatgccagaagaaggtaggttttggtaggttttaggaaaaaaaaagtctagtcttgtattcccttataaaaattcttatttttcttcccagagcctgggtagtaagtttctcagctcctttttctattgggtgatttcaaatggaattctaggccttagcatgaaaatactaccagggaaaagaaatagggaaaaaaacctctcttccattttggttacagaaaaaatgagttgttttcaaaagaaagtgtggtggattatactggtgaattacaaagatgttccataacctcagttcttctccttctcaggttgaagaatttgtgaccgtggataagttcgtttcctgttatgtgaacttggcagattaatgctaaatcctgtgggacagcatttagcaacacctaaaaaagtactcaattatgattttttgtgtactaaatgattatggaaatactaattctgtgtggaaagaacacactcaaagggctttttctattctttcaataacaacaatcaacacagaagacttttgtgaccaaaagcgtgggttttctccctaccaaaaggcaagcagtgtatcctgcagtggacagcaactgggtctcttccaattcagttttgacattctctaccctggagatagtttcagagcccataggttgatggctcagtccccacatccctccctccctgcctgccactccctaccattcaggtatcagtggtaagtctggaccaattataacccacaggtttcaagttggagttcttgtgctctctttgggtttaacttgctattgtggcttgcagaactcagggaaacacttactcatcttcacagtcttctttcatttctttttttgtagagatggagtctctctatgttgcccaggctgaactcctggcctcaagtgatcttcccatcttggtctcccaaagtgctgggattacaggtgtgagccaccatacctaactctcaggtttctttctttttattttttttttttgagacaagagtctcacactctgtggcccatgctggagtgcagtggtgcgatctcagctcgctgtaacctccactgcccggattcaagctattctcctgccttggcctcccgagtagctgggattataggtgcacaccaccacgcctggctaatttttgtatttttagtagagacggggcttcaccatgttggccaggctggtcacgagctcctgacctcaagtgatccacccaccttggccccccaaagtgctgggattacaggcacgagccactgcacccagccaaggatattttaaaggatacaaataaacatccaggtgaagagatacatagggtgaggtctagaagggtcttgagcacagtagcttctgtctctggggttagggtgtgccaccctcccagctgatggataagttcttgtttaccttcctataagcctgcatgtgttgagctgtctgggagctttctgaatcctgtactctggggccttttcttgagacctcattggataggcatgattcataactatgtagaaattagctggacaaaaaaggtagaatctaatactgatagactgaatgggaaaatccaccaagccctgtctgttcagattctttttggcttctctatgtagcattccttcctccagggtatgagacaggaccccttctgaaatgagcgtctgatgacccacaatcagaaaagctgggaagattagactccttccttgggcaggtgaaggacagcaggaggtcagtgagagaaattctgtcttctcagtcctgcctctgaagcctacagtgccacagcactataacaggggctgtgacagttacgagccaggaaaaatgcaaaaattagccaggtgtggtggcgcatgcctataaacccagctacccgggaggctgaggcgggagaagtgctggaaccaaggaggcggaggctgcagtgagccgagattgtgccactgcactccagcctgggtgacagtgtgacttggtcgaaattaaaaaaaaaaaagttccacatatccctagggcagaggcacactgcagccaagctctttgctaaggaaaaacaaaagtgacctgtgcttcagttcccaataaatacttataagtattgtcctttccatctgagacctcctcagcctgaactttatatcactatcagcattttggtcacaaccattcagcaagcctctacaaagtctcaaactccctcatcttcctgttgtcttctgagccctccacactcttccaaacctctgcctgttaagaagttccaaaaccaattccacattttcagatatcttgatagcaatgcgccacttctcagtaccaattttcttgtattattccattcttgcagcatgataaagaaatacctgagactgggtaatttataaagaaaagaggttgaattggcccatgattctgcagactgcacaggaagcatggtactggaaggatggcatctgctcagcttctagggaggcctcaggaaactgacaatcatggtggaaggcaaagggggagcagcagttcacacggccagagaaggagcaagagagagcagggcaaggtgccacagacttttaaatgaccggttctcacaagaacttaccatctcaagaacagcaccacagggatagtgctaaaccattcatgaaggaccaccatccagtcacctcccacaaggccccaccttcaatattgggaattacaattcgacatgagatttgggtggagattcaaatccaaaccatgtccttttgcttttttctgttttgtttgtggagtagatttttctccatccctttactttgagcctaagggtgccattgcatgtgagatgggtctcttgaagacagcataccattggatcttgcttttttatccaagtcaccactgtgccttttaattggggcatttagcctgcttacattcaaggttagtatttatatgtgtagatttgatcctatcatgttgttagctggttattatgcagacttgtttgtgtggttgttttatagtgtcactggtctatgtatttaagtgtgcttttgtggtggctggtaatggttttttctttccatatttagcactcccttcaggacctcttgtacagatgttctctttcattgtaatcacacaggatgggctatgtcacccaaataacatgtggtggtgattaacatgtgaaatgttacctgccagggtcacgcattacagactctgtgcccagagtattttttcatggctcttgttttctgttagttgtaatagaatacctgaaatttggctgggcgcggtggctcgtgcctgtaatcccaacactttgggaggctgaggcaggtggatcatttgagaccaggagtttgtgaccagctcagccaacatggtgaaaccccatctctactgaaatataaaaacaaagccgggcatggtcatgcatgcctgtaatcccagctacttgggaggctgaagcatgggaattacttgaactgggaggtcgaggctgcagtgagccaagattgccccccctgcattccagcctgtgcaacagagcaagactgtttccaaaaacaaaaaaaaacaaaaaaccctgaatttgggttaatatataaaaaatacttattttgtacaattctcaaagtttggaaatccaagggcaaatggggtacatctggtgaaagcttcttgctctttactgtctgaggcagtggagatcactaggcacgggggctgattgtgctaactctggtctctttctcttcttacaaggccacaagtcttatttgtaggataacccattcattcattacctcttcaattcgtcagtggattaatccattcatgaggcagagccctcatgcctcttaaagggccctgctttcagtactgacacattggggatcaaatttcgttatgagttttggaaggggaaattattcacacttagcaagggctgattaggtacactgcttctgctgaaaataccacactctcagagggaaaatgggaattaggcaaataccatattgtttgcataagtagttaaggcacacacaaccccatttattagttatgttggtgcagatcttcccaaatctagcccctagataccatcaaagttcaactttctaaataaacgtgtaagaatatgcagtctcagaactgctaatttgtctcttatagacagtatgtttgggactttctcatgagaggtaatactgacccactatacagagagacactagaggtgatccaggcagcatatctcagtctctgaaatcaccaatgagaggcatgtccttgttggctgtcactttactgaatatattcaattctagcatcagaattgctgtgatggagaaagtgagtgtagacagaagacaagaggctgaccaagtcattgaataaatttttggagtccacagcatcgtgtgaacttctgaagtgagtatagattcctaatgctgttggtctgaaccttcctcctctgccatgtgggatgtttcaggactcagtgacctttgaggatgtggctgtgaacttcacccaggaggagtgggctttgctgggtccttcccagaagaatctctacagagatgtgatgtgggaaaccttcaggaacctgatgtctgtaggtaagggtgacatcatttcttcacttagtcaattatagaacaagtgtttcttggtcttctgcattgctcaatgatttggaacatggtagggaatacagcagacccttgaacaaggtgggggttagagactctgatcgtccacacagtctgttaggtgcctgtgaatttagagtccctaaagagttaactactaatagactgctgttgaccaaagctgtattgataacagaaagtcaattaatacattttgtatgtttggtatatatctatatacatatatatggccaggtgtgggggctcacacctgtaattccagtactttgggaggctgaagtgggaggattgcttgagctcaggattttgagactggctgtagcaatgaagtgataccctgtctgtataaaaaataaaaaaagtagccatggatggtggcacacctgtgttcctagctattcagaaggttgaggcagtaggttcgcttgaactggggaggttgagcttgcagtgaaccatgattgcaccactacagtttagcctgggcaacagagtgagtccttgtctcactctgtgtgtggctgggcatggtgacttgcgcctgtaatcccatcactttagaaggctgaggcaggtgcatcacttgatgtcaggagtttgagaccagcctggccaacgtggtgaaaccccatctctactaaaaatacaaaaattagcttggtgtggtggcatgcacctgtaatcccagctacctgggagggtaagggaggagaatcacttgaacctgggaggcagaggttgcagtgagccaagaccacgccactgcactctagcctgggcaagagagagagactccgtctcaaaaaaaaaaaaagtgcgtatgtgtatatatgtttaagacagggtcccttgctaggtctagaggcgagtgccaccatccccagctaatttttgtataatttttttgtaaggtggagggtcgtgaactcctggcctcaagcattcctcctccctagcatcccaaagtgcagggattacaggcatgagccaccatgccaagcctgtttggtatgttatgtactgtattcttataatacagtaagcttttcttttgaaaaggttatcaaaaaaattagaagagaagatatgttgactttagtaagtgcaagtagattatcaaggtgttcttccttggttgtcttcatattgagtaacctgagcaaaaaaggagggtttggtcttgctctcttagagatggcaagagctgatgaaaatgtgcatgagtgaactgtgcagttcaaaaccatgttggtcaaggttcaactgaactttggtgaataaatcagccatggccacagtgtcccatgaacatagaatctaataatttttctataattttgtaataacttatgatgacttttatgggtctgcattttaggaataaaatgtgaagaccagatcattgaagatcagtacaataattccaaaagaaatctaaggtcatttgcacttacaacctagagctatgtcccttaagatattgttagaatgacaacaaatgttaaaagcaagcaaagaaaatgaagcagcccagcttcaaattcattcatttttagaaaaaattttccaggctgggcatggtggctcacacctgtaatcccagcactttgggaggtcaagggaggcagattgcttgagcccaggagttcaagaccagcctgggcaacatggtgaaactccatctgtacaaaaatctaaaagttagccaggcatggtggcatgcacctgaggtcccagctactagggaggttaaggtgggaggatggcttgaacccaggaggtcaaggctgtgatgaatcgtgaacatgccactgtacttcagcctgggtgacagagtgagaccttgtctccaaaaaaaaaaataactattttccaaaaacaatatacttacacaagacataaatatccagtgttttcaaaatagttgccttggagccagtgttaagaaattgattatgaatatcaatgttttgataataagtgtaatgcagcccttttgcagagtattcagtccattgatgtttacacagttcagacaagccagaaaacctactttccatcataatgcaaaatatgtaaatcaaatacctactaatgaatataaaatcatttataaaccagcccttggtattgtgcttatttctcacagaagtcatatggtagagagagtctgaaggtaaggaagatggtcaatgtgaagagatcttcagccttgttccaaatggtatagtgaagacgacttttactggagtcaaatcatgtgaaagcagtgtgtgtgaagaaggcaatatggatcattcatctcttaattgctgcatcagagctgacactggacacaaatcagatgagtgtcagcaacatagaagccacataagcagtgtgtgaaaaccttcagctattgccactcctttcaaacacatgaaaggcctcacactggaaagaaactccatgtaagaaatgtggaaaaaccttcatttctgttcaaaccttttgaagatacatggtaatgcacagtgaagatgaaccttataaatgtaagttttgtgggaaggcctttgataatctacatttatatcttacacatgaaagaactcacactggagagaaaccctatgaatgtaataaatgtgggaaagccttcagttgttccagttccattcgaaaacatgcaagaattcacactggagagaaaccctatatatgtaaacaatgtggcaaagcctttagatattccagttctattcgaaatcatgaaaacactcacactggtgaaaaaccctgtgaatgtaagcaatgtgggaaagcctttagttattccagttactttcgaatacatgaaagaattcacactggagagcaggtgtataaatgtaaggaatgtgggaaaacattcacttatcccagtgcctttcataaacataaaagtacccacacttcacagaaactttatgaatgtaaggaatgtgggaaagcatttgattgttttagttcctttcatagtcatgaaggggttcacactggagagaaaccctatgaatgcagaacgtggaaaagccttcagtagttctaagtacttaaaaatacatggaagaactcacactggagagaagtcctatgcagtaaagaatgagggaaagtattttattgtctcagtccccttcaaagacatgaaaggactcacatcagagaaaagttgtatgaatgtaaaaaatgtgataaagccttccattcgtccagtactgttagaaaccatgaaagaagtcacatttaagaaaaacacagtgatgttaggaatatggggaacctttcctttctcttccagtctttggaaggcacagggtatgacacactggtgaccttataactgtaaggagtgtggataagtatttattagtccttgtgtgttttagatacatgaaagaatttactcaaaaggaaactctatgaatgtaaagaatgtggtaaaacctgtgtagtttcagtttctcttgaataaagtcatttcctggtattctcaggggattggttccagcaccccttgagaatatataattttgctcaagtgctttacagaaaagtgtatttgcctataactaggcaatcctgtatactttaaatcatctctagattacttataatacctaatgcattgtaaatgctatgaagacaactgttttattgtatttagggaagtatgacaagaaaaaacatctgtacatattcagtacagacacaaccaccatacggctacctacctagtacacatcatctacaatataacattttctttttaaaaaacagttatggattggtttcattaaatgacctgcaagcgtgtgttaaccttctgtaaaaccctggttattttctcctggtagcccacacatgatgatgatgaggatgatggtgattgctctgtggtgcctaaagttgcaacatgttgaggtgccaagatatgtggcagtgtcgataagcaatgagatgtcaattaaactagaatcatctgacaggacattagaagtatcatctatgttggaggtaccaacttctgactgcagatgttgactctttcatcaataatacaaatgttggatctacggaatttgagggtcaaagatatttaagcattgatggtcccacagattctagttggggacattatcaaggatgcagtttacccagagcgattaaccctagtggaggagctagattaggaaagtttctggggtcatggttaagtctaggttctacttggaatggatatctaaccagaaatctttcttgtatcattagtagagttgcccatttcaccaccgaagccatcaggacacaagagaagtctctaggttcccttgcctgcatggccctagacaaccacattgcagctatctccctactttacagggtagtgtctgtgctaacccttgcttctgcatctgggtaaaatacttccagtcagactgaattgggaacatataagatcttaaaaccagccaaatctctgaaagggacaccttcagaaaccctcctgtctagacttactgggttacatttccaatttccagatattttcagctggctcttcccctggtataggatttcttctccattctgccctacaagtctcaatgatcctatttaaaatatgcatttggctcctctttaaaattgttctatcttgtttcaacagatgcctccaagagacccccactaggttcttgctgacctaatacttgagattttaaactcactccagctggccactgaaaccaacttaacccaagagattttggctaaaatttaacaggttcctgagaacctcttataagtaaatggctatagttgcccaactggccactgccctgccattaggatccctgcatgggatggacccacagcaggtcactggtaccatgatagaacacacacaaaaacttatgaatgctgtctgtggacgggttagagtcagtccttcacactggctaactgggcctaagttttaaaaagagctaagccgccacttgttaactaggggtcacaagcactgtgagtttcctgaaaaccaacacctttttaactttgggggctcacctgagctagtcaatcagagctcagctgtatcaaccaatcagaactgagtttcaagtttcagatcttcatttgcataaaagcacttgactaggaacccagatgggaacttttgctataaaacctaagctttcccttgttctctggaacaaataatgtttaggttgcaaactccttatgccttttccccagaactatgtagaaataacgccttctaaaatgtgatcttgataccagggaactcctttttttttttttttttttttttttttttgagtcggagtcttgctctgttgcccaggctggagtgcagtggcgtgatctcagctcactgcaagctccgcctcccaagtggctgagagacaggtgcgcaccaccacgcccagctaattttttgtcatttagtagagatggggtttcaccctgttggccaagatggtctcaatcgacctgaccttgtgatctacgtgcctcggcctcccaaagtgctgggattacaggcgtgagccaccgcacctggctgataccagggaactcccagagcaaagcactaaatactttcattcctctaaggtctatgactctaatcagcagaaagtagttagagcagttatcattccttttccttcaagacttaggaatgaacataataggagggatttgtaaccacaacagattatgtggtacaacttctatataacaaagctgagttttcagttgccatggacccaacactcaaggtcacataatctgagcatgcccagatgaaccaaatgtgtaaccatgggtggaacctatatgcttggactgaggtgtggagattaaagtaaaaagtagatgctgggcacggtgactcatgcctgtaatcccagcactttgggaggctgaggtgggtggattgcctgagctcaagagttcaagaccacccagagcaacatggtaaaaccctgtctctgtgaaagatacaaaatattaaccaggtgtggtggcgcacacctgtagtcccagctacttgggaggctgaggcagaattgcttgagctccagaggtgaaggttgcagtgagcgagatcatgccactgcattccagcttgggctacagagtgaggctctgtctcaaaaaaaaaaaaaaaaaaaagataccacatggtggaatctaggatctaatcaggttgggccccggtatcatcccatggcaggatccaatcgagtcacattaacctggcatgagatcattgcaagatgcagtgagttcatgtcttattaccccacgcttataaaacttgccaaagcccccagctcagggagacatatttgagcatttcttcctttctccttgccagtcaaacttgtagtaaagcttttctttcttcaaaagctggtgccatgctattggcttgtgtgtacatctggaagtgagccaattcactacttgctaacataacaaagaatcagcaactgtgaagatgaaacaattaaaattatccagtctgggccaggcgcggtggctcacacctgtaatcccagcactttgggaggtccaggtgggtggatcacctgaggtcgggagttcgagaccagcctgaccaacatggagaaaccctgtctctactaaaaatacagaattagctgggtgtggtggtgcatgcctgtaatcccagttacttgggaggctgaggtagaagaatagcttgaaccaaggaggtggaggtagcagtgaaccgagattacgccattgcacaccagcctgggcaacgagagtgaaactccatctcaaaaaaaaaaaaaaaaaaaaagaaagaaaaaaattaccagtctgtggaaaagaaagaggaaagaaattgagagaatgtgttactagtatacctgccttgccagtcatgttaaagttcttcagagcgaaggaaactgatacaggttaggaaagcagatgtttcagaaataaaacttgttagaaaataattaaatgagggcacaaatatgattatcttttcttctccttcatagataaatgtttgttcaaatgaatatcaacaatgtattgggtggttatagcttctaacaggtcaaatgcgtgacagtgatattatatgggattggaaagaggaattcagaacactcttaacatattggcactaccccagacaccagtatagtgttatttgaaaatgaaagtccattagttgcaaatgtatactgcaaactatggaattcactaataaaatttaagaaacaagtagacttactacactaatagaagcaagcaaatggaatcatatagaacgctcaattaaaaggcagaaaaatagagcaagtagaaaaaaagcacaagtacaacaaacaatatatatgaacatattaatctatgtcaattaccactttgaatgtgtatttttttttttttttgagatggagtctcgctccatcgcccaggctggagtgcagtggtgccatctcggctcactgcaagctccgcctcccgggttcacgccattctcctgcctcagcctcccgagtagctgggactacaggtgcccaccaacacgcctggctaattttttatatttttagtagagacggggtttcaccatgctagccaggatggtctcaatctcctgacctcgtgattcatctcaggaagacaagatgggtggatcacttgagcccaggagttctcaagaccagctgagcaacatggagagaccctgtctctacaaaaaataaatacaaaaattagccaggcatggtagcacacgcctgtagtcccagatgaggtgggaggattgcttgagttcgggaggcacaggttgctgtgatcacaccactgcaccccagcctgggtgccagagaccctgtctcgaaaaataaataaataaataaataaaccaaaaaacctgatttatctgaatttaatatagccgttccatacttttgagtagggctagaatggcatatatttcaccatacctttctatttaaggtatctgtgtctttctgttgaaaatggttatcttttacacattgctgggccttgtttttaattctactctgccagtgcctgtcttttttactggtgtatatagataatacacattcaggccgggcgcggcggctcatgcctgtaatcccagcactttgggaggccgaggtgggtggatcaactgagatcaagagtttgagaccagcctaaccaacatggtgaaaccctgtctctactaaaaatacaaaaattagccgggtgtggtggcatgcacctgtagtcccagctactcaggaggctgaaacaggagaccatggaatattcaccaaggcagaccacatagcataaaacataccttaacaaatttaaaaaaatcaaattccataaaatacgaaatcaaaccgtattagcattaaactagagatcaatagcagaagcatagtttaaaagcctccagaaagtaaagatttaaaccacaaacttctaaactatgcaacagacagaattctccagagatacttaaatattccaaaaattgaaaaaaacttttagcaaaatttgtagaatacagcaaaggcagtgcttagagagctatttaaataattaaatgcaaactcttgaaagtaaagatctaaaaaacaatgctgtaaattccaccccaggaaactagagaaagaagagcacgataaatgtaaattaaggagaggaaaacaacgagagaagatattaatgaaattgcaaacaggaaatcaatggaaaacatcaacaaatccaaatcctggttttctgaaatgaataaaattgataaacacccatgctaactcacaaaagggtgggcatctctaagatttccatgaacattaaaagaaccataaaggaatattaactccatgcccatagatctgataaattacaagatgaggccgggcgcggggtggctcacgcctgtaatctcagcaccttgggaggccgaggcgggcggatcacgaggtcaggagatcaagaccatcctggctaacacagtgaaaccctgtctctactaaaaaaaatacaaaaaattatccgggcgtggtggctggcacctgtagtcccagctactcgggaggctgaggcaggagaatggcgtgaacctgggaggcgcagcttgcagtgagccaagatggcgccactgcactccagcctgggcgacagagcgagactccgtctcaaaaaaaaaaaaaaagtaaatctgagatgagttacagatgtcttcaaggtgacaaatccatggaggtgcagtgctgactgaaaacagacaagtctgactcaagtatcaggtcaggttctcctatcatctgagacataccccttcccatgctgctcactgaagtgctgagtgaccgccctcccaggagacactgcactgtgtgcttttgaggttcttgtaccacatcattggggggtgggttttcctttccttagggttagtttttacccttcactatgtggcaggccagagtctcactaacacaggcttccataacaactgtttcagcactgagtggttaaatattaaaagtcgagagagccgatgcctctaaacaaaggctggaatgtaacaaaagcccaacaagagttttgcccaggcctttcctgggccttgaagcatgacaagataacgaaggaattccttttttttttttttttttttttttttggagacggagtcttgctctgggactataagtgcatgccaccatgcccagctaattttcgtatttttagtagagatggggtttcaccatattggcaaggctggccttgaattcctgacctcaggtgatccacccaaagtgctggtattacaggcgtgagccaccgcgcctggcccagaaaacagcgttttgattgaatactatgacttaagaaatgtacacaaacactcgattctaatgggtatttttccctagaagggtatggattagcaattctgaaactattttacatgttagaatatatgttgttatgttatctacaatatatgttgtagataattagtgcctgtttctcactggagttgaaaaaagtaaaagaaataaagggacactgctagaatgaacccagtggtgctagaaatacagcaccagggaaaaagaatgtttaatgttgctgtgaactgaggagatgaaatcagagtcacaaaatgcagggaaagagcttaaaaaccaagggattttaagccctcggaggagttagttgagggaagagagtggtggattagaaaccctgattcccaaacctttggaagatgcagagggataccacttgccatttaggaatgtgaactcaaaagtatctgagacatgtttcaatttagaaagtttattggctgggcgtggtggcttacgcctgtaatcccagcactttgggaggcagaggcaggtggatcacctgaggcccagagttcgagaccagcctgaccaacagggagaaaccccgtctctactaaaaatacaaaattagccaggcgtggtggtgcatgcctgtaatcccagctactcgggaggctgaggcaggagaatcacttgaacccgggaggcagaggttgtaccgagccaagatggcaccactgcactctagcctgggcaagaagagtgaaactccatctcagaaaaaaaagtttattttgccaaggttaaggacacatccatgatacagcctcaggaggtcctgaccacatgtgtccaaggtggttggggtacagcttgcttttatattaatacattttggggagacataatacatcagtcaatacatgtaagaggtacattggttctacttggaaaggagggacaacacaaagtgggcgggggaggggtctggttcccaggtcacaggtggattttcccataaatggttgtggagaccaaagtttcataatgcagatgaagcctccaggtggcaggcttcagagagaatagattgtaaatgcttcttatcagacttaagttctgtgttgatgttaatactgataggcttttcctgggttccaaaagggaggcaaatataatggggcacgtccagctgatacagtttgactgtgtccccatctaaattgcatctggtattgtaatcctttcgatttaggctattgcgccacagagcctgcttgcaggaattgtaatcctatttgtaatccccatatgttgagggagggacctgctgggaggtgattggatcatgggggtggtttcccccatgctgttctcctgatacagtgttctcacgagatctggttactggataagtgtctgggctcctcccttctctctctccctctcctcccttctctctctccctcctgccaccccgtaagacgtgccttgcttccccttctgccatgattgtaagtttcctaaggccatgtggaacagtgagtcaattaaaaactttttttaaaaataaattacccagtctcaggtagtatctttccagcagtgtgagaacagacgaatacacagaccacccttccatgatggcctgaacaagtttttcaggttaattttgtagtgccttcgccgggaggagggatctgttcaaaatgactggggggcttagaattttatatttggtttaaaaaaggaataaaggaataaagaaggaactggggaccccggaccgtagctccttccacgcatgaaccccgcacacgagtcgggattccccccatgaccctcccgtggcccccgcacaatctggagagacgcggggctgcgggcgcggagctgcccagagaggactcctgcccgggcccgcagtcgccgcgaagggacgggacaggacgcccggggtcccggctgccagcccagccccaccctgcggccgaggggaccgagggccgagctccgccagcggtactccggtccacagagcccggagtcgctggctgggaggccggggacccgccacggccagttccaaccagcccctcctcccgtctcgggatccctggcccctcacgctcaccattttccgaattcctccgtgtcccgggggcctctctgcggctcccacgaccagtgcaggtccctgtgtgacagaggctgccgcagactctccagagtgcctctcagcgacagagacaggagcccagcgaagtggcgtgtagaagacgccgcgggctttttcaatctcgcaccctcttagctgaagtgcgcctgattgacagttcccacgaccccgccccacggccctgattggatagtgcgacagatcccgccccctgacgactgagttacagaagcgatctcacgctggggagtggagactgatgaacgagttcttgacacagcccttggcagggcgggcttcttccctgcgctgtgacctgacccctcccaggggacatctgcatttaagcaggatcccccatctgtactcagtgtgaccttcctgctttttcctcctagactggggatcacaagtgtgtgcagggaaacccagacacattgtccagtggagccattccctggcctcggagtaggaggagagccgaggccatacgggccacactgcaacaagaataagggcttaggctgggcgtgatagctcatagccgtaatcctaacactttgggaggccgaggccggtgcattgcttgagcccaggagttcgagaccatcctggacaacatagtgagagcctgtctctacaaaaaaatacaaaaattagcctggaatggtggcctgtacctgtagtcctagctactcggaaggctgaggtgggaggatcacttgagcctgggaggtcaaggctgcagtgagtcaagatcgtgccactgcactccagcctgggcgacagagtgagacaccatctcaaaaaaaaaaaaaaaaaaaaaaaaaaaataagggcccgatgtgttccagggatcaggaattttggataagtctgttggctgcatggccaagcctttctcccaccttatctctcaatctactgattttcagccaaggaagtaataacatgccaacaacggaataaaatcattaaatgtatggaaaaagtggaatcacatagtagcaatattttataaggaaatcgaaagacaagaaaagcaaacactcgaactagttgagataagtagcctgctgcacccacagttcacaaacctgcagtcagaaggtgatacacgttcccaagcttgtgagtcaaactctgatgaggcaggggcacttaaagatttaactctgggaactcaacgtggcctcctactccttctccagagtgtggaaatgctccttccttcaagaccttcattttctttctttctttttctttttttttttttttttgagacggagtctctctctgtcgcccaggctggagtgtagtggcgtgatcttggctcgcaaccttcgcctcccgggttcaagcgatcctcctaccttagccacccaaggagctgggactacaggcatgtgctaccacgcccagctaatttttttttttgagacacagtctcgctctgttgcccaggctggaatgcagtggcacgatctcggctcactgcaacctccgcctcccaggctcaagcaattctcctgcctcagcctcccgagtagctgggactacaggcgcacgccgccatgtccggctaattttttgtattttagtagagacgggatttcaccgtgttgcccaggctggtcgcgaactcctgagctcaggcaatttgcccaccttggcctccgaaagtgatgagattacaggtgtgagccactgcactcggcccactaatttttatatttttagagagacgaggttttaccatgttggccaggctggtcttgaattcctgacatcgggtgatccacccacctcagcctctcaaaatgttgggattacaggtgtgaaccaccgtgccggccaagaccttcctttttgccagcaggaaactctcatctaaaaatcagtttaatgcattgacctatataaactgtcaaattcataactccttttccagaaggcaatctaatgagtctttaagtctgaccttcacagattttcctcctatatacaaatgacagcctgcctcctgtgactctgtgcatgcccaaggcaaagcacttgaatgtactgagatcttcaatatttacaaaagaagatggtcagattaaaatattctgtctatgccctcaatgagcaggtagtataacaggttagagaggacaaaatcaaataaaatggacatggaacttacccatgatatcacagtctatcctggaggatttttgtggttgttttgttttgttttggagacagggtctctgtgtcaccaaggctggagggcagtgagtggtgtgatcccagctcactgcagcctcaagctcctgggttcaagccatcctcccacctcagcctcccaaggagctggaactgcaggcgtgcaccaccagcttggctaatttaaaaaaattttttgaggtagacacggcgtggcggggggatgggggagtctcaccatgttgcccaggctggtcttgaacccctgggctcaagcaaccctcccccctcagccttccacagtgctgggaatacaggtgtgagccaccgtgcctggcgatggtttctaaaaagcactttgcttcaaaggatttagagagccacaggtgggttcatctggggccagttagactgcttgaaaaggaaagctatttatgcaatctgcagctgcctaggaaatggccccaaagttcccagagttacagtctcaaaaaggacgcaaccccctagctgcatctacatgtgggtttcccgctttccagggcactgcagcttctcagaatccacagtccttagctgttctgagcagctggaggccatccgcaagggtaggcaggatgcccagctccattctcctccctttgtaggcttaagactggtgtcagcttaaagtcactgtcctcaggctctgctgcccactccaggtttttagggctccgaaaacaatgatcctcaaaacaggtctcagaagcagaagtttttctctgaccttctcttgccctcctgtctctcagtcccattctccaccaagggtagccatagaagctagaatccctcttccccaaggcaggtcatagaatccagaacccctattccccaagggcagccataaaatgcaaacagataactttccctgtgccttcctttggaaaaactggtcacaaagaatttatctgacctaccttatttgactgtaggtcataagactgtcatttaagagaggattctggccaggtgcggtggctcacacctgtaatcccagcactttgggaggccaagacaggtggatcacgaggtcaggagatcaagaccatctggccaacatggtgaaaccccgtctctactaaaatacaaaaaattagctgggcatggtggcacgcgcctgtagtcccagctactcgggaggctgaggcaggggaatggcttgaacccaggaagcggaggttgcagtgggccgagatcgcgccactgcactccagcctggagacagagtaagactccgtctcaaaaaaaaaaaaaaaagattctgtctcatacctagaaggaaggaatgctactcagagagaccaagaaaaatctagacagacaggccttctgggtttcctcactcagtctgttagcattcaatcataccttttttgttcaatcaggtttcttcatagctgttcacacattgttaaacccaagcacaaaaatgtacaacttaccctgtatctctgagtcttcattctgaaggctcctgtgtatatacattaaataaaatgtgtatgccttttctccaattaatcagtcttttgtgagttgatttttcagtgcaacatgagagggtaaaggagaactttccccatggcccctacaaggttattcacctgcctttcactgataagttaaatgagacaaagaccctcaatcccactgtttgaataagaagccagcagactcctgggttttctcctatgtttatatataaagtagaggaagaaaattctaagatattttatatgggttaaaaaaaaaaaaaagcctggagtccgggtgcggtggctcacgcctgtaattccagtactttgggaggctgaggcgggcggatcacaaggtcaggagatcaagaccatcctggctaacacggtgaaaccccgtctctactaaaaatacaaaaaattagccgggcgtggtggcgggcgcctgtagtcccagctacttgggagactgaggcaggagaatggcgtgaacctgggaggcgcagcttgctgagatcgcgccactgcactccagcctgggcgacagagtgagactctgtctcaaacaaaacaaaacaaaaaaaccctgaaaatggttggctatggtggttcaagcctgtcatcccagcactttgggaggcagatcacttgaggctaggagttcaagactagcctggccaacatagtgaaaccttatttctactaaaaatacaaaattagccgggcatggtggcccatgtctgtagtcccagctactcgggaggctgaggcatgaggattgcttgaacccaagaggcggaggttgcagtgagccaagattgtgccactacactccagcctgggtgacagagccagactctgtctcgaaaaaaagaaaaaaaattaaaaaccacctggatataattattcctttgagaaaacaaactgttattttcctcctaacagttgtataaaacaactaatcaggctgggcacggtggctcacgcctgtaatcccagcactttgggaggccaaggtgggcagatcacttgaggtcaggagttcaagaccagtctggtcaacatggtgaaaccccatctgtactaaaaatacaaaaattagcagggtgtggtcgtgcatgcctgtaatcccagctgcttgggaggctaaggcacgagaatcacttgaacctggggaggtggaggttgtagtgagccgagattgagccactgcaccccagcctgggtgaaagagcgaggctctgtcacaaaacaaaaaaaacaaaaacacacacacgcacacgcacacactaatcaaaagtgaactctcccctttttcctctgtttcagcagctccccaaccttcacagttcatggttgtcatcacgtgctctgtacctggtaatggacatgttcagtttacccatctgaaactctcaaccccactccatcaccactgacccatccaatcatttctgcagctaaattctaagcattgtataaatacctcttccctttcagcagtccagctggcccaggttgaatccacctgtggctctctcatttccctcaatttcaattattcatttgaaactatcttccaggatcgactgtgatatcttgtatgatgaccacattccctttatttgcttctgttcttcctaacccatgtcgccacctgttcattgagggcacagacagaatattctaagctgactatcacctgctgtaaattctggagtctcagcacaacctggagaaatccacagcccagagaggatgttaatgccatccttaccacaagagggagcttcttattttcacttctggaaaatggctaaaaacagaattttggagttttacatagcacaatatagatgatagaagtaaaggtaacaccattcaattttgtttcattttctttctttttttttttctttgagacagggtctcactctattgcccaggcaggagtgcattgtcacgatcacagctcactgcagcctcaacctcctgggctccagtgatgctcctgcctcaacctccagttagctgggaccacgggtgtgtaccaccatgcctggcttattttttaaaaagttatttgtagaggtaggggtctcactatgttgcccaggtggtcttgaactctgggctcaagtggtcctcttgcctcggcctcccaaagtgttaggattacaggtgtgagccactgtggccaacctggtttcatttttatgatttaacttttcctaggttaaaaaagcaaataagtccatgcacagtggctcacctctgtaatcctagcacttcgggaggtcgaggctggaggatcacttgagccaaggagtttgagaccagcctggagcctgggcaacctagtgacaccctgtctccaccaaagaaagaaagaaagagaaagagagagagggagagcaaaaaagtctgtgaatcttaactgaatttctctgaatatgagaagtgcaaggaaatatctctacaaacggaaagatgtaggagtaactgaggtggtacaaaggattctctctgagatggtgacatttactgtgagacctgaaataatatattagggcagtaaaacgttagggcagaggattcagggaagatggcagagtagcaagcataaaaaagctttctcaggccgggcgcagtggctcacgcttgtaatcccagcactttgggagactgaggcgggcagatcatgaggtcaggagtttgagaccagcctgaccagcatggtgaaactccgtctctactaaaaatacaaaatttagctgggcatggtggcctgcacctgtaatcccagctacttgggaggctgaggcaggagaatcgcttgaacccgggtgtcagaggttgcagtgagcagagattgcaccactgcactccagccgacagagcgagactccatctaaaaacaaaagcaaaaacaaaaacaaaaacaaaaccaagctgtctcagccgggtgtggtggctcacagctataatcccagcactttgggaggctgaggtgggcagatcacccggggtcgggaattcgagaccagcctgaccaatgtggagaaacctcatctctactaaaaatacaaaattagccgggtgcggtggtgcatgcctgtaatcccagctacttgggaggctgaggcaggagaatcgcttgaacccgggaggcagaggttgcggtgagccgagatcgcaccattgcactccagcctgggcaacaagagcgaaactctgtcttaaaaaaaaaaaaaaagctgtctccccacctagacaaccactggactgacagaatcatctgatgtagcaatgttataactgtggaggctattgaagctttgcaacttccataaaaaggattagacagtaaactatggctaattgtggtcattttatcacttagcacaatacaagctatcatccccacccttacccctgttgcaggcagctgcacatggagtgttttcctctaatttggcctcgggatctctctcagaagcgtggctataaactttagtgctggccaggcggggtagctcatgcctgtaatcccagcactttgggaggccgaggcgggcggatcacaaggtcaggagatcaagaccatcctggctaacctggtgaaacccagtctctactaaaaaaaatacaaaaaattagccaggcatggtggcgggcgcctgtagtcccagctactcaggaagctgaggcaggagaatggcgtgaacccgggaggcagagcttgcagtgagccgagattgcaccactgcacaccagcctgggccactgagtgagactctgtctcaaaaaaagcaaaaacaaaaacaaacaaaaagaactttagtgctgcattgacggggctccaggacacttggttgtggatatttacagtgtgactttcatggggtctaatatttaagtgttaacccataaccaaatgtccttcacaggaaacttgattatactggcagatgcccttatggttctacctctgccaagttaatctctaccaagatagccagatacccactctctacagagccctgacctggtaataagctagacataggtgtggcagtcaggtgagacgtgtgagacagcatcaggcaggccaatatatgcactgtgggagtttcagaaggagaagagacagagaaaggtcaggggagactatttggagaaataatagctgcaaatattccaaattagataaaagccatgaatgaatgctgtcatccaagaagctcaatgaactccaggtaggatgaatgcaaagagaaggacatgaagacatattatactcaaattgtcaaagccaaacataaagggagaaccttgaaggcagcaagaaagaagtgaatcatcacatataaatgatctttcataagatcatcagcagatttctcatcagaagcgctgaaggccagaggtagtgggctgatgtattcaaggtacttaaaaaaaaatggccacggtggcacatccctgcagtcccagctattccggagtctgaagtgggaggatcagttaaggcccaagagttcaaggccagcctaggtaacatggcaagactccatctcagaaacaaagacagccaagaatccaatatctggcaacattgtctttcaaaagtgaggaggaaattaaggcatgctcacatgaacaaaaactgaggtagttttgttctttttgtttttgccattagatgtaccctgtgagaaacgcaaaagccttctacaggttgaaatagaacactggacaatatctggaaggcgtaagcccaaataaagatctcagtagaaacaaatgcatggacaattataaatgctaatattattgtacaataattgtgaactccagtttttgtctttacataattgaagatacaaatccattaaaaattattagtctaaaagctagcattttagacttggcttttgaactctatattttgtttttttacacagtttaagagactaataaaaaagaaactaggttgggcgtggtggctcacgcctgcaatcccaacactttgggaggctgaggcaggcagatcacgaggtcaagagattgagtccatccttaccaacatggagaaatcccatctctactaaaaaaagaaatacaaaaattagttgggcgtggtggcgcacgcctgtaatctcagttacttgggaggctgaggcagtagaatcacttgaacccaggaggcggaggttgcagtgagccgagattgcaccactgcactgcagcctggagacagagagagactccgtctcaaaaaaaaaaaaaaagaaagaaagaaacgaatgcaccgaaaatatgtttgcgtttttgaatacataaagtataaagatgtaaatttatgacaccaaactgaaaggggtgtgaacaggcatgccatggagcattgtatttgcatgctatttatgttaaattggcataaatttagaatgttatggccttaggatggtaaacgcaatccccatggtaattaacagagcagtagtgtatacacaaaaggaaacaataaagaaatttaaatgtttcactacaaaaagcaattaaaagcaaaataatgcagaaatgcatgaaatgagaagaaaaaagctacaaggcatattgaaaacaaataggaaaatgacaaaaccaagtcctttcttatcaggaattactttatctatttattcattttgagacacagtgttgctctgtcgtccaggctggagtgcagtggtacgatctcggctcactgcaacctctgcctcctaggttcaagtgattctcatacctccaaagtagctgggattacaggcatgcaattctcctgcctcagcctcccaagtagctgggattacaggcatgcgtcaccacacccggctaatttatttctatttttagtagagacagggtttcactgtgttggccaggctggtctggaactcctggcctcaagggatctgctcacttcggcttccccaagtgctgggattacaggcgtgagccgcagcgcctggcaatgtgagttaattttagtgtataatgtgagaaaggttctcagttcatctttctgcaggtcaatatcccattttcccagcacattgttgaaaacccattccctatgaaagcatcttggcccatttgttgaaaatcaatgagccataaacaaagagtgtcttagtccatttgtgctgctatcgtggaataccacagactgggtaatttataaagaatagaaattgactttctcacagttcagaaggcttagaaatccaagaagacactggcatctggcttcagcattgctgcattctcacagggtggaagacaggagggcaagagagggcaaattgcattcatcaaaccctgtataatgccattaatctattcacgagggcagagtcctcatgatctaatcaccaaaaggcccctcctcccaatagtgttgcagtgggaattaagttctgacttataaattttagagagtacacaaatatttaaaccatagctaagggactctcaattctgccctgctggtctatatagctgacaatttgccagtaagtctggttactttactacccaccctgatgctgaagcatcccattccgtcccacatgatagtcatgcaggcatagaaatggttctaaagccgcaagagcatcccttagacaacctagatgtacttctattttaggatacatcctgtaaaagaaattttctgaagaacataataatgggtcatgccatggttgctccacatgaaacgctcggggcactgtcttcactcactgtaaaatcagcccaaggactgaactcatagctcttaggaaagcttgcacattggcaaacaagaaaactgacacagagagtaagcttccacacccacaatctcagctactcaggaggctgaggcaaggggattcttgaggccaggagtttgaggccagtttgaaccacacagccagattccacctcaaaaagaaaaaagaaaaagaaaacggctacaatttacacggataccagatacgctttgggagtctttcatgcagtggacacagtctcaaaacctggaggatttacaacttgttctggttacttattacctatcatctattaccaatggacatgtaatacatgcactattacaggctattcatctccctcccaaagtggctactgttcactgttcagtccatattaaggagacttatcctatgtctttcaggaatgatagggcttaaatactgttaaatagaaagacagacatgtacccctttatcctttctccccccaatttataagcctgccttttttttttttttttttttgaggtggggtcttgctctgtcacccaggctgcagggcagtggcatgatcacagctcagtgcagcctcaaccttccaggctcaagtgatcctccaacttcagcctccaaagtagctgagatcacagacatgtgccaccatgcccaaataatttacttttttatttttatttatttatttatttatttttatttttattttttttgagacagagtctcgctctgtcgcccaggctggagtgcagtggcgcgatctcggctcactacaagctccgcctcccgggttcacgccattctcctgcctcagcctccagagtagctgggactacaggcgcccaccaccacgcctggctaattgtttgtatttttagtagagatggggtttcaccgtgttagccagtatggtctcgatctcctgacctcgtgatctgcccaccttggcctcccaaagtgctgggattacaggcgtgagccaccgcggccggccatttttttattttttgtaaaggctgtctttaactctggttgatattactatcaggtaaatgtcccataatctgaaggagaccaatagatacaaaagagagacaaacaattgttggagagattatatatgcctcatgattagtaattatagtaacttgttaacaattgtcattgttaatgaaaatcagattataccaaacatactccttgtagcccctttctctctctcttttttttttttttcttttttttgagatagagtttcactcttattgcctgggctggagtgcaatggcacgatctcagctcattgcaacctccgcctcctgggttcaagcaattctcctgcctcagcctcccaagtagctgggattacaggcatgcgccaccacgcccggttaattttttgtattttttagtggagacagtgtttctccatgttggtcaggtggtctcaaaccccctacctcaggtgatccacccgcctcggcctcccaaagtgctaggattacaggtgtgagccaccatgcccgaccagcccctttcttttgatattttgctttgcactaatctcctaccagctgggacatttacagagataggaaatagttaagaaaattaaaaaaagaaaaaaaaagaaaaaaaagaaaagaaaactggctgtgccctggcatttacaaaatttctgacccaattatttctcacaacactacttacttgtaaatctcacacaacactgcttacttgtaaatctcacacaatttcattcccatgtatatattcaagagaattgagggcagggactcacacagacacatgtattctaattctatagcagccttattcacagtagtcaaaatgtgattgtggaaacccacatgtttatcaacatataaatggatgagaacagtgtgttttaactatacaatggaaaattattcaagcactaaacaagaatttctgatatgtgccaccacatggatggatcttggaaatattatgctaagtgaaattagccagatatagaagcacaaatactgtatgctttcacttatatgaggtgcctagcatagtcaaattcacacagagagaaaatagaatagagattatcaggacctgggggtgggagagaatagggaattatgtgtatgtatatgggatgctaagtagaaatagcaagtggtatggtaacatgtatagtataatcccatccagtatgtattttagtttgtaccagcattgaagaagggtcttccagatggacagtcccagtggttacacttgccataggcaacaatgcccctgggccacatcttggaagtctatttgaattacatttcaatgcaatttattcttatgaatactctaatgaaacagctcttatcaaggcacccagtgaccaaacacttgtcaaaatctacgtcaaccctgtttccttgtcttattcaaactctcagttacctgtgacagagttggccactctctcatctttagatactttcttctggaggcttccaggagaggacatccacctgttactcctcctgcctcaccagcctgcccagtctcttccaggctcttcctcctgctaacctcaggggttgccagcacttggactcctcttgagcactcaatttttaaatttattttttatttttatttttgagatggagtctcgctctgttgcccaggttgaagtgcagtggcactatctcggctcactgcaacctccacttcctgggttcaagcaattctcctgcctcaccctcccaagtagctgggactacaggcaaacgccaccaaagccggctaatttttgtatttttattagagatggggtttcaccatattggccaggctggtctcgaactcctgacctcatgatctgcctgcctcggcctcccaaagtgctgggattacaagcgtgagccactgcacctggctgagcagtcattttctgttataattcgctcctaactctgaaaccagttggcctgttctggacccggggcttcaaataacttccgcatgataatattctcaacattccatccagatctcccttgcaagctccagactcccaggtccagtggcctgctgaaaaatcttcccttgtttggctcaaatatgtcatggctgaacatgaaacgtaacccttgacttcccctcctgtcaactcccctgagccttgttcctctgagtaagaggcagcacccaggagctctgaacagtaggacacatccttgactcttctctcttttcacatcatcagaagttctacaggagctacctctgcctggttcactcccactcaggtttcaggttttaatttgagcatcagtccccacaccagggaagcctccactaacctctcagactcgtttgggaaccccctccatcatcatatgctctcagatccacacacccttctgtactgcactgaacactatcagcaccggtcctttatgtttatgtccagactccactaaatagtgggaatggtagggcctttctctaccatcccacccagctccaaaaacactgctcaggttcatatctagatttcgaaatacacaaccttctgttaacatccactaacactagccaagtccaggccagcacgacctatcttgcaactactactgtggttttcaaactggtcttccagctcccctctagcatctttttttcccaaccaagagaaggagtaaacttcttcaaacactaatgaaaactgctgctttgctcaaaatccagtaactgtctataacatggcgacaagatcccatgtgatctggcccctgcctacctattgaagcccatctattattaccttggcactctagctgtggtccaaggatcaacaacacagatgacacctggaagcaagttaggaaggcagactttctttcatttttgagacagagtttcgttcttgttgcccaagctggagtgcaatggcaagatctcggctcactgcaacctccacttcccgggttcaagtgattctcctgtctcagcctcccgagtagctgggattacaggcgtgcaccaccatgcccggctaattttttgtatttttagtagagattgggtttcaccatgttggccaggctggtctcgaactcctgacctcaggcaatccacctgcctcggcctcccaaagtgctgggattacaggcgtgagccactgcgcccggccaggaatgcagactttcatgccctactcttaatctgctgagtcagaagctgaatttgaagatccatatttcctgtgaaagtttgagaagtacatctcataagcttccccctccacctgattcagccctaagggtattgcatattcctcaccactgaggtatttgaatcaacaaaatgtcttaggtggcgtagacccaggagggctgcaaaatgcttgggcttgaactgggagaggacactagagagacagtcccaagaagaccatgcggccacggccgagcctgcctttccagcactgccatggcatgtcccactgctcctgaagtacaggaatggccactcatgggaactgaccgggagtgactgtgtgcgcagtcagcaacacactgaggctggagtgcttgtagcaggatgagccgcagacgaaacccctcagacatcacgttaaagaaggaagggctttattcagccaggagcatcggcaagactcacatcttaaaaaccgaactccccgagtgagcaattcctgtccctcttaagggctcacaactctaagggggtccgcatgagagggtcgtgattgattgagcaaacagggagtacgtgactaggtgctgcatgcactggcaattagaacagaacagaacaggacagggattttcacagtgcttttctcttcaatgtctgtaatctacagataacataaccgattaggtcaggggtagatctttaactaccaggcctagggtgaggcgccgggctgtctgcctgcggatttcatttctgccttttagtttttacttcttctttctttggaggcagaaatcgggcataagacaatatgaaggggtgtctcctcccttctgctcacacactgaggctggagtgctcgcaccctgctacccatgtgctcaccctgggattcggggaagcatgcacacaggcaagcaggaaaaacacgaggatcctggaaggggatgggcagaacgtgatggaggagagaggtttctgcttcctccaagggccaaaagtcactgtctgacatgtgaacgagatactctaacagagttcggggttggggtaggggcagatacccagtacctgctacaaaaggccagtagtaaagtcacaacaaataccaaaatgtcatgtttcaaaggctctttagataagcatcgattttaaaaccatataagaattaaacttgttgccaggcagcatgactcatgcctgcaatcacaacactttgggaaaccgaggcgggaagatggctcgaggccaggagttcaagaccagcctgagcaagatagcaagacctcatttctccaaaaaaaaaaaaaaaaaaaaaaaaaaattagctgagtttggtaccatgcaccagtagtcttaactacttgggagactgaggcaggaggatgtcatgagcccaggtgctcaaagctgctgtgagctatgattacaccactgcattccagcctggataacagaataagatgcgatctctaaaaattaaaaaaaaaagaattaaatctacttgtctattacacataaacttcaagcaactcaaggatccaagagaatacaaaattgaaagaaaaattttatcaactgactttaccaaaacaaacccaccacctattcaacttatgaaagctctttttaaaatcaacttttattttagattcagggagtacacatgcaggtttgttacttgggtattttgcatgatgctgaggtttaaagtatgattgattccatcacccaggtagcgagcatagttcccaacaggtggtttttcaacctttcacctccctccctcccccgtctactagtccccagtatgtattgttcccatctttatgtccatgtttactcaatgtttaactcccccctttttttttttttgagatggagtctcgccctgtcacccaggctggagtgcaatggcacgatcttggctcactgcaacctccacttcctgggttcaaatgattctcctgcctcagcctcccgagtagcttggattacaggcacctgccaccacgcccagctaatttttgtatttttagtagagacagggtttcaccatgttggccaggttggtcttgaactcctgacctcgtgatccacctgcttcggcctcccaaagtgctgggattacaggcgtgagccactgcacccagctgtttaactcccatttctaagtgagaatatgtggtatttggctttctgttcctgtgttaatttgtttagggtaacagcctccagctgcatccatgttgcatcaaacgacatgattttattctttttttttttttttttgagacagagtcttgctctgttgcccaggctggagggcagtggcacaatctcggctcactgtaacttccaccaggttcaagcaattctcctgcctcagcttctcgagtagctgggaccacaggcatgcaccaccacagtcggctaatttttgtatttttactagagacggggtttcaccatgttggccaggctagtctcgaactcctgacctcaggtgatccacgcctcccaaaatgctgggattataggtgtgagccattgcccctggctgatttttttttttttttatggttgtgatgaacctttgtgtaaagaaaatttacaaagatatctcacattaattttttaatataagacttaggaatccagagtgaagatctattttgtcaatgagccactgataaagacaatatttatgtattttataacatttctttgatgtggcaaattttctggaacattatacatgagtaaatttggttaagaatttcctgaattacttacgtacatttacctccagtcgtgtgaggatgaggagccttcaagccaacaaagttgtagacctatatccatggaagtgacgagcaggtcatttcatcaggaaactctcacacttgtcagcagatagatgctgcacatggaattagttctattcctcagaaatttatatatatttgtaagaaatgtgatttaaattcaatactatatagtttatgttattgtgtacacagcatatgtttactccataagcaggaccttgactccattatcaggtttaatacttttccaggtgttttgtttttagtttcctgggcaaatagtgctatcatctccaatcacgatacttgcttcttccatctggttcttcatagtgatcttttttttttgtttttgtttggagactgagtctcgcactgtcacccaggctggagtgcagtggtgcaatctcagctcactgcaaactctgcctcccgggttcaagcgattctcccacttcagcctcccaagtagctgggattataagcggccgccaccatgcctggctaatttctgtatttttaggagatatggggttgcaccatgttggccaggctggtcttgaactcctgacctcaggtgatctgcccgccccggcctgccaacataatgatcattttttgacagtaagtactatagactaccgtaataataagtggggttaaacagacatatttgctttcattagattctgttcctcctttcactgggaagcctctcacctaccggttcctcatcgtgctgtgctctgaaacataccttaatgaagaatctgatatccaaaaaattcatcttcaaaatggaagacaaaagaaaaactatcccaggcttaaaatatatatattgagagaatgtgttcctactacaccagacctacaagaaagatcaaaggagggtcttcaatttgaaattaaaaaaagtcaaaatccacagggaaaaacaaagagcaccattagagattatgtaagtgggaacgacaaatggtatgtgtatttcttcatctttcttctcgttatagatttaaaaggcaactgtgtaaaataataagtagtcaatggattgttgggcctacaacatagaagaatgtaacatgtgcattatatttacaaatgaaaccataaaaaagtgagctaactaaatgactaccaaagcaaagtagaaagaatgtattgttggatgtgtaaacctaaggattgttacacatgcaacaaaataccccagaaaggcaaaaaatataatagggctttagaggataaatatgtttgtatatcactggaatttatccatagatcactggaaaattgaccctgattgggataagttatttacatgataaacacttgagtaaacactacagaacctcaagtcatcctacattgtaaagacgtattggatgaaagcagaatttactgtccttcctaaattaaaaatggacactacatacattctataacattatgaggacaagatttccctcattcatccaacttggaagtttccatgttatattacatatttccccttcaacattcactctacaattagaatcagaaaattgtttcttgtgcaggtcgtgatctctctatatccatttcttgaacttctagcccaggtacagaattacatttcaacgatcccttattttgcattatatgttctcaaaaaattttttttttttgagacagagtctcgctctgtcacccaggctggagtgcagtggcgcaatctcggctcactgcaagctccgccttctgggatcacgccattctcctgcctcagcctcccgagtagctgggactacaggcgcctgccaccacgcccagctaattttttgtatttttagtagagacggggtttcaccgtgttcgccagggtggtcttgatctcctgaccttgtgatccacccccctcggcctcccaaagtgctgggattacaggcgtgagccaccaggcccggcctccctgactttttttatggtgcaaaaatacacataaaataaaatttaccctctttttttttttttttgagaaggggtctcactctgtcaccaagttggagtgcagtggcacgatctctgttcactgcaatctctgcctcctgggttcaagcaattctcctgcctcagcctccccagtagctgggactataggcgtgcgccaccacacccagctaatttttgtatttttagtatagatggggtttcaccatgttggccaggatggtctcgatctcctgaccttgtgatccccctgcctcggcctcccaaaagttctgagattacaggcatgagccactgtgcctggacaaaatttaccctcttaaccctattcatgagggccctaccctcatggtctcatttcatcctaatgtcctcccagagatcccatctcctcattccatacattagagagtagtctttcaacgtatgaatttcaggggacaaataaactcaataatattgtaatctccaccccaatgtatttcctcacatgcaaaatacatttattccatcccaacaccatcaaaagtcttgactcattctatcattaactctgaagcctaaaatcaaagtctcatttaaatagcatctgaatcagataagggtgagagtcaatgtaacattcatgctgagccaacattcttctccagatgtaaaatcaaatcagttgtgtacttttaaattataatggtggaacagttataagataaacaatgctattccgaaggggagccatataaggggtggaagagtgacagttcccaagcaagtccaaaacctggaaaggtaaacttcatgagatttttttttttttttttgagatggagtttcgctcttgttgccaaggctagagtgtaatggcgcgatctcagctcactgcaacctctgcctgccgggttcaagcgattctcctgcctcagacccctgagtagcttggattacagccatgtgccaccacgcctggctaattttgtatttttagtagagatggggtttctccatgttagtcaggctggtctcgaactcccaacctcaggtaatccgcccgcctcggcctcccaaagtgctgggattacaagtgtgagccactgcgcccggccaggatcttaaggctaaataataatcccttttcattcaatactctgccctcaaggaattgtgacacagcaattgtgtcccagcatctctgttagacatggatcaaacccaaatagcgtttgatggcactgcatccacacttctgggtttagctcatcttgtttgtggaaactccaaaatgtcccctactgttgatgctcaggaggcagccttcatgacctctaaacagctactgggatccttcttctcttgtctctaagaataccatgcattcagctctatggatggttcctgtaaaatcatacaggtccaacaactttcattttttcctgtgaccttcactttcagttcaaaggggctattttactgctgaggtggctaagtccatggttaacaagaataccactcttcctatcaaaaggtcttggacacacccttggtgctgtcttcccagcatgccttttcatctttgcgataattgttttctaaacattttcatttcaatttctcaatttcttcttgcttaataattccatctccaacatttttctctactcacattttatttatttatttattgagacagaatctcactctgtcgcccaggctggagtgcactgttgcgatctcggctcactgcaacctctgccacttgagttcaagcgattctcctgccttagcctcccgagcagctgggattacaggcatgtgacaccacatctggctaatttttgtatttttagcagagacagggttttaccatgttggtcaggctggactcgaactcctaacctcaagtggtctgcctgcctcagcctcccaaagtgctgggattacaggtgtgagccaccgcgcccggcctctcctcacatttagtatatgcagtcaagaggatccaagttgttttttttttcctttttttttttttttgagacagagtctggctttgtcacccaggctggagtgcagtggcgcaatctcggctcactgcaagctccacctcctgggttctcaccattctcctgcctcagcctcccgagtagctgggactacaggcgcccgccaccatgcccggctattttttttgtatttttagtagagacggggtttcactgtgttagccaggatggtctcaatctcctgacctcgtgatccacctgcctcggcctcccaaagtgctgggattacaggcgtgaacccaccacgcccggcccaggttgtttttttcaacacttctaagaaatattgtcagctcaatatcaagtttcatcacttcctagttctagtttccccaaaacagtagcaccggagtacaatgcaccaagttctttgccactttctgcaacggttcatcttttctctattatgcagtaatattgtcctcaattctgagacctcattagtattgcctttattgtccatatatccaccaaaattttgtacatgattttttatgtgccctagtaagatggaagctttctctattcctctttttattttatttttttagagaaggggtcttgccacactgcctaggctggtcttgaactgctaggctcaagcgatcctcctgcctcaccctcccaaagttctggcattataggcatgaaccaccataccccgcctgcctgtcctcttttgtgagctcttaccagcgtccaaagacaaaattacaacaaatttaggtactggcagatttagtgtctgatgagggcctgttttctgattcacagacagctgtcttttttgtttattttttgaggcagagtctcactctgtcacccaggctgcagtgcagtggtgtgatcacggctcactgcagcctcggcttccctgggcttgggtgatcctcccacctcagcctcttaagtagctggaactacaggcgtgtgccaccatgcccagctcatttttgtattttttgtagaaatggggctttatcatgttgcccaggctggtcttgaactcctgggctcaagtgatctgcccacctcagcctcccagagtgctgggattacaggcatgaaccaccaggcctagcctcatagataactatcttaatgtatcctccaaggcagagagcaaaaaagcaagctgctgggcggactcacaataggtaaccaatttcattattgaggctccactctcatggtctaatccaatctgtattatattccaaagaagacgttccctaatctgtcacgttagggaaatggattagaatgagtggattttatgaagacatttattccctaacaggtggtatgctttttgttgttgactttttagagttctctaagcagtctgcatattaatttcttgtcagatacatgatttggaaatactttctctcattctatgggttgtctattttgatgccgaaagtttaaaaattccatatatttccatttattctcttatgggtcatgcctttggtgtcatatctaggaaatcattggaaaatccaggttcataaagcttttgccttatactttttttttttttttttgagacggagtctcactctgtcaccaggctggagtgcagtggcgcgatctcagctcactgcaacctctgcctcctgggttcaagtgattgtcctgcctcagcctcctgagtagtgggattacaggcatgagctaccatgcccggctaattttgtatttttaatggagacggggtttctccatgttggtcaggctggtttcaaactcttgaactcaggtgatctgccagccttggcctcccaaagtgctgggattacaggcgtgagccaccgtgcctggacagggaagggtacattttcattctgttgcatatggatgtgcatttttccccagcatcattctatggaaatactgtcctatcctccattgtatcgtcatagtacgcttgtcaaaaattgttggactcactatgcaaacgtgtatttctgtgctgtctattttgtcacaatggtctatttctttgtcagtatgctgatattaaatttttttattagtataaatttgctctaagttttgaaatcaggaagtgtcaatctaccaactttgctcttgtttttcaattttattttttatttatttatttttttgagacggagtctcgctctgtcgcccaggttggaatgcagtggcgcgatcttggctcactgcaagctccacctcccaggttcaagccattctcctggctcagcctcccgcccgagtagctgggactacaggtgcccgccactgtgcccggctaattttttgtatttttagtagagacggggtttcaccgtgttagccaggatggtctggatctcctgaactcgtgatccgcccgcctcggcctcccaaagtgctgggattacaggcgtgagccactgcacccgacgtttttcaattcttgttttgtatattcagagtcccttaagatgccatatgtaaaacaatggaaaaatgggtcctaaaaactaatcaagtggtcaaagctatccctaaaaggctagcagggagcaaaaagtgctatttctcaatgagaaaataaaaatcttagagagatgttttgaaaaatgccatgtcacttttgaaagtgggccacatggtaagaacaaactaagcattcacacactaaagcagaaagaagctgaaattcttggaagtcttagagctgcctctacaatgggaaaaatgacccctctgcttcatgataaactgagtaaaaagactgagaaagcattaagtatgtggctagaggacacatcgctgaacaacatctcttttgataataaaataaagtgggaaaaaacagcctctataaataccactgtgagaaggctgaggagagcaaggaaaaggagtttcaggccagtattgtctggctgggctagctacataaagcgccagagcctcaaaaatttaaagaccacaggagaattgacactggcttatgccaaggcaatattagcattcccagcagagctcacaaaactcataaaaaggaagtctaccttccagagcaagtcctccattccaatgaattgggcaagccctagaaaaagaaagcggtccagtggtacctacatccatgactgccaaggaggccctggggctcagggcctggaaagatcacctactctggtgcagtgtggcaatgtggcaggtcacaagaacaagccaggccttggctactgagcaaacaatccctaggtcctttagaaccaaagcaaaacttgcctgcctcctttctggcaaaaatataagaaggcttgggtgatgatcatcttgtccttggaatggttctaccaaggcttcattcctgatgtgaagaaatatcttgaagagaaggggctgccactcaaggtccttctcataattgacaatgttcctggccatctccaatctctctactttgccacaaagaatgtggaagtgatgtccctgctgcctaacactacatcacagtgaaagctactcaatcaaggcataatcaagtagatcctgaccttcgggaggattcatgccatcctgatgctaactctgactgtaccatagtggatttatgaaagcacttcacaattgcacatgcaactgtccttattgcagaggctatagatgtcccagagctcaagaaactcaaagcatgctggaagccattatggagtgagggagtcaataattttaggggcttccccactattgatgcagtagttaggaatatcttaaatactgcaaggggagttggtaagaaaggctatctctgacaggattgaagacgatgttgagtaacacacagaagggcataaattcttacaacaaggaactcaaagatctgctcaaatgctctatagattgatgatgataatgatgacttaaaaaaggtagtgccacagatttggacacttgaaaaatttgcagtagttttttttattttttttgagacggagtctcgctctgtctcccaggttggagtgcagtggcgccatctcggctcactgcaagctccgcctcctgggttcacaccattctcctgcctcagcctcctgagtagctgggactacaggcgcctgccaccatgcccagctatttttttgtatttttagtagagacagggtttcactgtgttagccaggatggtctcaatctcctgacctcgtgatccacctgtctcagcctcccaaagtgctgggaatataggtgtgagccacctcgcctgacctgcagcagtttttcaataggcaaaactgttaagaaagttcatcatcctcaagtaagatccttcgatggaacaaagcctccatgtcacccatggaataacatgccaacaaacagtgcaagatttttttgatgactcaaaaaaaaagaaaaaaagaaaaactagcttcctacacttctcactaagcacctgcaaatataaacacagagccttccatggttaaggatctgcagccctgaagctgaacagatcttgacattagtattatttggcctcctccaacaagtcaacatctgcatcagaacctagttctttgaacactgatgatcatcctgatattctgtcaaggttcaagttagcctgatgtctcctgcttgtctataatgctacaacacatgacaatgttaggcaccatccagcaatcatcatcatcatcattatacttgggttatcaagagagaagcaggattttgataagtgttgacatgctcattcaggtcacaaaacaaaagcaatctgtgaatgttaaaacaaattttaatgttctgggtgacatataccacgtaggtgggcctgcaatggttgtgtctgcatcgaacatgtagagactatttttcttgtcatgattctctaaacaatacaatcaaacaactatttacatagcttttacaatgcatgaggtattaaaagtcatctagagatgatttacacagtatactggaagatatgcataggttacatgcaaatatgccatataacaaaggacttggcatctgtggatttagagggtgctggaaccaatcccctgcaatatattgggggataactgtatttaaaaaaattgaaactacttaaggctttatcccatgtttacattcatagggtctatctccaaagtgagttctttcaagtttctgaaattaaagtactgaatgttttcccacattccatacatttagagagtatctttccagtgagtccttttatgtctatgcaaggaacggagagaactcaatgctttcccacattccttacattcatacagcttctctccagtgtgagttttttcatgtcctcgaaggaaacgggaacgagtgaaggctttaccacattgtagacattcatagggtttctctccagtgtgaattctttcatgtcgtagaaggcaagtgagccaagagaatgcttttccacattccttacattcatatggcttctctccagagtgaatcctttcatggacttttaagttactgaaatgactgaaggcttttctacatgttttacactcataaggtttttctactgtgtgggtccttttatgttgagaaaggtatttgaaacaactgaatgctttcccacattccttacactcatatggcttctctccagtgtgagttgtctcatgattttgaaaggaagagagatcactaaaggctttcccacactgacatttatagggtttcactccagtgtgagttgcttcatgtcttcgaagggaaccggcaagactgaaggctttaccacattgtttacattgatagggtttctctccagtgtgagtcctttcatgtctttgaaataaactgggacaaccaaaggctttcccacatatcttgcatttctggggtccatctcctgtgtgtgttatcatgtgacttcgaaagctcgagctatgagataacactttcccacactgcttacattcatagggtttctctccagtgtgagtagtttcatgatttcgaactgaactaggacaatcaaagcctttcccacatatcttacatttatgtggtccgtctccagtgtgccttatcatgtgtcttcgaaagcttgtgtgatgataaaacgttttcccacattgcttacatgcatagggttgttctcccgtgtgagtcctttcatgtagtcgagtgtaatagtaacagctgaaggctttcccacattgtgtacatttatagggtttctctccggtgtgagttctctcatgtcttagataggtactgtaatcaggaaaggctttggaacactgcttacattcatacgctttctctcccgtgtggattctttcatgtcttagataggaactgtaaaaaggaaaggctttagaacactgcttacattcatacggtttctctccagtgtgtgttctttcgtgcaaatgaaataaactgggccaaacaaaggctttcccacacaacttacatttataaggtccatctccatggtgtgccgccatgtgtcttcggaggtttccaagagaactaaaggtttttgcacattctttacaatcgaagggtttctttccggtggggggcctttcatgtgtctggaaggagtgctgatgactgatggctttcccacgttgtttatgtgtatatggcttctctccatattcctgatgctcacatgatttgtgtccagtgtcaactctgatgttgcaattaagagacgaatgacccaagacgacttctccacactcaccactgtcacatggatttactcgaggagtgttcttgttcacaatactatctggaatctggccaaaagtttctccacattgactgtcatctttaatttcacatgtatgacttctgtaacaaataagaaatatattactaaaggtttgtttataagtgattttctatatattgaagtactagatttatatttgtaacattatcatgcaaagtacaggcttcatcccctgtttgaatgtgaagtgacagtgctgtgtaagatggtcccatcacagctattagcaaaacagtgatattcacatggagattctttctttctttctttcttttttttgagacggagcttcactcttgttgcccaggttggagtgcaatggcacagtctcggctcactgcaacctctgcctctcggattcaagcaattcttctgcctcagcctcccaagtagctgggattacaggcatgcgccaccacgccctgctaattttgtatttttagtagagacagggtttctccatgttggccaggctggtcttgaactcccgacctcaggtgatccacccgccttggcctcctaaagtgctgggattacaggcgtgagccaccgctcctggcccacatggagattcttaataccatttccaagggaactattttgcaaagactgaatagctatgtcacatttaactatatgttcctcgggaaaatttttttttatagagatggggatctcactatgttgcccaggctgatctcaaactcctaggctcaagtaatcctcccaccttggcctcccaaagtgctgggattacatgtgcgagtcactgtgcttggtcagaaaaagaattattggaatgaataaatttaagctgggcttgttcattttctctgctcgtttttaaaattttcttatcattctatgaaccactgcagggacatagctttcttttgtgggtgcaaattaccttagatttctcttggcattttggcactgatctccaatgttctggtcctcccatttcatttctaaaaggtagacccaggaaaatcactaaaaatgtttacaaaattatagaaaaactctaagattttacgcgtactgcaatcatgcatgattcattcaccaaagtacatgtgactcttcaacaacacaggtttgaactgcacagctccactcatacatgaatgttcttcagtctctgctacccctgggacagcaagaccaacccctccccttcctcagcccactcagtgtgaagacaacaagggtgaaaacctttatgaagatctacttccacttaatgaatagtaaatatagtttctcatctttttttttttttttttttttgagacagagtcccgctctgtcgcccaggctggagtgcagtggcgcgatctcagctcactgcaaactctgcctcccaggttcacgtcattctcctgcctcagcctcccgagtagctggggctacaggtgtccgccatcacgcccggctaattttttttgtgtttttagtagagacggggtttcaccatgttagccaggatggtctcgatctcctgacctcatgatcttcccgcctcggcctcccaaagtgctgggattacaggtgtgagtcaccgcacccggccagtttctcttcttatgattctcatcaacattttccttcccaagcccactttactgtgacagtacagtatgtaatacatatgacatacaatatatggattaatctaatgtttatgttatccataagtgggccagtcaacaataggttattagtggttaagttgcgggggacaaaaaaagttattagaggatgtaagactgtttgaggggctgacacctctaaaccctgtgttgttcaagggtcaaccatatcctctttccatatttcaaatcatgaacagcgttgatggccaggaaacaaatgtctctaattgactaagtgaagagatgatgtcatccttacctatacagtccaggttcctaatggtttcctgcatgacatttctgtagagactcttctgtgatggacccagcaaagcccactcctcttgtgtgaagttcacagccacatcttcaaaggccactgagtcctgaaacatcccacatgtgcagaggaggaaggttgagatggacagcactgagaatccatactcactgcataaactttgcatgatgctgtggtttccaagcatttattcgatgacatagtaaacccactcttattttgtctacactcactttttcccacaaagccattgtgatgctttagttgaatgtgtttggtaaagtaacagtcgaataggaacctgcctcttgttggtgagttaagtgagtgagtcttattgcctgcgtcacccctgatgtctatttctacagcggtctgtgtagttcttatcatgacaaagtacaactacctattgtgtagaagagttaccactcccagtcctgaaactgcatatcctgacaaatgctcatttgcaaacttggatctttcatggtgtctaggcaccggatcccactaatgtaactaataacagaggctgagtgtgcctaaactgtttatgcaaaatataggggccaggcatggtgacttaggcctgcaatcccatcactttgcagggccaaagtggaaggatcacttaagaacaggagtttaggaccagcatgggcaacatagtgagcccttttctcaacaaaaaataaaactaggtctgactcagtggctcatgcctataatcccagcactttggaaggccaagacaggtggatcacttaagcccaggagtttgagaccagcctgggaaacatggtgagaccttgtctctataaaaaatacaaaaaaaaaaaaaaaaaaaaatagcaagatgtggtggcgcatgcctgtagtcccagctacccaggatgctgaggtgagaggatcacccaagcgcaggaggttggggctgcagtgagccgtgatcatgccgctgtactccctccagcctaagcaacagaatgagatcctgtctcaaaaaatataataaaagtaaaaaacaaaaaataaaaaatacatatatatatatatatatataaatttttttttaacttaactcctattccccctctgagagtttggaagtttgttacatgatcagcagagagagaatacctgttagccacagcacaagttagaatgcttgtgctctccaaaactcatgctgaaacttcatcctcaatatgacaataatgaaatgtggggctttaagacttgattggatcttgaggtactaatccattcatagattaatggcttaatgaataaatggggtatctcaggagtaggcctagtgtccttaagagacgaggaagagacctgaattaacactgggcccctggccatgcgataccctgtgccacctagggactctgcagagtccccaccagcaaggaggctcttaccagatgctaagccttgaccttgggcttctcagtctccagaagtataaaaaaataatgtttgtttgtttttataaattacccaggctcaggtaatcctgttataagtaacaaaaaccagactaagacagttatgaagaaacactctggacactggatcactactgacggaccctagtagctaacgtttcacgtgtttggttgcaacttgttacatgggatatttagcccatcctatgcaattacactaagagagaacatttggaaactggcaactggtttccattagaccaaatgtagttaagcgtgacaaaagactaataaaaaatatctcactatctcaatggaaaaattacacatttttcattggataatgacaaaggaggaggaaagacagggaaagattgcacatgttctaacaaaaaactcagtgtcacctctcatgattatctataatatttcctaaattcctaaagagacttttagcagtcaacaaagattatattaccaaatctaataaaagtcacaaatatctgaaaaggttaaaaacctaaccggcagggtgtggtggctcacgactgtaatcccagcacttcgggaggcctaggggggcggatcaaaaggtcaggagatcgagaccatcctggccaacatggtgaaaccccgtctctactaaaaatacaaaaaaaattagctgggtgtggtggcgcacctgtcatcccagctactcaggaggctgaggcaggagaatcgcttgaacctgggaggcggatactgcaatgagccaagatcatgccactgcactccagcctggagacagagtgagactccatctcaaaacaaacaaacaaacaaaaaacaataacaacaaaaaaagaaaccgcccaaaaaaaccttctaaccaagaaagttacagctttccaaaaacagataaaggatttttaaactataatattcggcatcctatactattaacagggagataaacaaacagaaaaaggaaagcaaaaaatggttgaaaagctttgtggagtttttatttgcccttgtcccaatccctcctcacatcagagcccgtcttgaagacagcagaccaagttttcaatgtggatccctagagacagcagatcaggtcttacttgcaaattattgcctttgtattttccagttggtacaaggactatccaaaggtctgaaacaggctctcttttctttctttcttttttttttttgagacgggagtctcgctctgtagcccaggctggagttcagtgtctcgctgcaagctccgcctcctgggttcacgccattctcctgcctcagcctcccaagtagttgggactacaggcacatgccaccacgattagctaatttttttgtatttttagtagagacggggtttcaccgtgttagccaggatggtctcgatctcctgacctcgtaatccgcccgcctcggcctcccaaagtgctggggttacaggcgtgagccacagcgcccggccaagactctcttttccatttaatcagtgatggaacccaatcagggtcaaacatggcaagaactgcttcaaaatgttgcaaaatacacagaaagccttcaaccacctggaacaacagattacggttaagacgaacagcagacctactaagtcttgggaagaaaagctggagataaaatttccttcagaaattagggtactgaaaagcacacaggtatattatggcatacttttcttatactacctgatctaacagatacaaatttgtttgaaataatactagcaatgtattgggtagtaacagcttccgatagggcaaatgaataacagtgtgttatatgggatgggaggatggaatttggaacagtaagtaataccagcactactcccaaagccagtatagcattatttgaaactgaaggtccattagttataaatggtatactacaaactatagggaattcactaataaaatttaagaaacaagtagacttactatactaatagaagcaagcaaatagaatcatatagaatgctcagttaaaatgaaagcagaaaaagtggagaagttgaaaaaacagtcaagtataagaatagaaaacaattgacatatgtacatattaatccaattatgtcaataccactttgaatgtgtatatctacatataccagttaaaaagacatggactggctgaatagaattaaaaaaacaaggctggaagggcacagtggctcacgcctgtaatcccagcattttggaatgctgaggcgggcacattgcttgaggccaggagtttgagaccagcctgtccaacatgatgaaaccccgtctctactaaaaatacaaaaaaattagccaggcgtggcagtgcatgcctgtaatctcagctacttgggaggctgaggcatgagaatcacttgaacccgggaggcggaggctgcagtgagccgagattgtgccacctcatttcagcctgggcaacagagcaagactctgtctcaaaaaaaaaaaaaacaacaaataaaacaaggcccagcaatgtgtacatgaaaaccattttaaactgaaagatgcaaatacattaaatataaaggtatggaggaatatatgccattctagccctaatcaaaagaaatatggactagctattttaaatttagataaatcaggttttaggtcaaggaaagatacaggggatgaagagatttcataaagataaagaagtcagttatacaagaagacataataatcattaatatctatgctcataaaacaaatcatcaaaatacataaggcaaaacttataaaaccacatagcaaaatacacatgtactagatggcttcccagtacctactggctttcaatgtgtgctaacctcttctttctgggatctctaaataatacatagtttctgttatttcttgcattttgttgagttgcttcctctgtgtcttacctgaccaatatacctgaatctaatttctacccagtcagggctttctttgtaagattattttggcagtggctatcttggtagtaataaaagaaaaactggtcagacaatgggccataaggtgtctaccaggaaaaacaagtttcctctaagacggaaacttggtcactggtctgatatttaggcattaggtcaccttgtactatcctacaagttacgtttggaaggctttcaaattaacctgtttggggaggtcttatgatccagggcttatatcttgtccctgagtaaagaatctttttttttttttttcctttgagacggagtttcgcacttgttgcccaggctggagtgcaatggcatgatcttggctcactgcaacctctgtcgcctgggttcaagtgattcttctgccttggcctcccaagtagctgggattacaggcctgtgccatcatgcccagctaattttgtatttttagtagagacagggtttcaccatgttggtcagggtggtctcaaactcccgacctcagatgatccgcctgcctcggcctcccaacgtgctgggattacaagtgtgagccaccgtgcctggccgttttcttatgtaagaaaataaagtagatcccaaaggaagggactcagaaattcaactctgaaaattaagaagaagagttgtgcgtgacttatgcctgtcatcccaatactctgggaggttggagtgggaggactgcttgagtttgagaacagcctaagcaacatggcaaaacctcatctctacaaaaaatttaaaaattagccagggatggtagcatgtgcctgtagttccagctacataggagacgaaggcaggaggattgtttgagcccaggaatctgaggctgtggtgagccatgatcccagaactgcactccaacctgggtgatagtgcaagaccctgacttaaaaattaattaattaattaatgagaaaatggctgaaaattatttcacagtagatgaaaggccatacagaaaaaatgctcaacaccgatgttaatcagtaaaaagcaacatctaatcacatggagataaatatttataaggaataaacacacatgcacacatggtctgccagttaatccatacatgccaacgggttttcctagcacatttaaatttatccataatccacaacccagcacatttccccctatatgtacaaaatgtataaagtgttagcatttggggacaaaaacaaagatgacattgtcaacaaagtccagcaaaaatgaaacaattcaagtcctatgagccgtggaatatgagagtgaagtgggtgacccacacctcagacagcagcatgaatcaaacagactgaggcaaagaaactaaaaaaaaaaaaaaaaaaaaaccgcccgcagccgggtgaggtggctcacgcctgtaatcccagcactttgggaggctgaggcgggtggatcacctgaggtcgggagttcgagaccagcctgataaatatggagaaaccctgtctctactaaaaatacaaaattagccaggcgtggtggtgcatgcctgtaatcgcagcttctcgggaggctgaggcaggagaatcgcttgaacccgggaggcagaggttgcggtgagccgagatcacgccattgcactccagcctgggcaataacaagagcaaaactccatctcaaaaaaacaaaaaaaccttttcagcatcatattaatggaatattaagtgtaatattaattaactgaaaactcagaagagagaaaactatgcatctggattcatacatgataaacatatactgaataacagtcagtcggtttaaggctctgacctgtggtgcctctgacttctgataacaaaggtgtgccgttcgctgaacaccaaccaattctccagcaataactgggtgtccagtagttcaattcttataccacccagaattaacacagatcccataagtttcttgctagagggctcagtcccacaacaggcccccactgcagatgtcatttgtaagccccaggaactaaccttttaaccaactgtgtataaatacaacagcaccatcctctggttcaataactggctaaaggccaggcgcagtggctcacgcctgtaatcccagcattttgagaggctgaggcaggtggatcacctgaggtcaggagttcgagacctgcctggccaacatggagaaaccccacctctactaaaaatgcaaaattagccatgcatggtggcgcatgcctgtagtcccagctactcgggaggctgagacaggagaatcgtttgaacccgtgaggcagaggttgcgatgagccgagatcgtgccattgcactccagcttgggtaacaagagtgaaactccgtctcaaaaaaaaaaaaaaaaaaaattggctaaaataactcatgaaactcagcaaaacactagtaacttaaggttactagtttgttataaaggatttctcaacaacagccaaatggaaaagaggtattcagcaagggaaagggcagggatggttaaaggtttccctttttttttttttgagatggagtctcgctctgtcgcccaggctggagtgcagtggtatgatctcggctcactgcaagctccgcctcccgggctcacgccattctcctgcctcagcctcccgagcagccgggactacaggcaactgccaccacgcccagctaatttttttgtatttttagtagaaacggggtttcaccgtgttagccaggatggtctcgatctccagacctcatgatccgcccgcctcagcctcccaaagtgccgggattacaggcatgagccaccgcgcccggccatttttttgtatttttagtagaaacggggtttcaccgtgttagccaggatggtctcgatctccagacctcgtgatcggcccgcctcagcctcccaaagtgccgggattacaggcgtgagccaccgcgcccggccatttttttgtatttttagtagagacggggtttcacggtgttagccaggatggtctcgatctcctgacttcgtgatctgcccacctcggcctcccaatgtgctgggattacaggcgggagccaccgcgcccggcaaagctttccctcttgacaccaccttcctagcgcatccacgtgttcaccaacctggaagctgtcccgatgtctttgttcaataaattttattcaacttaatttctagcctccctccctttcctggggtcagaagatggggcttaaagttccagtcctgtcatcatgtgtttgctctttcaggtcaccagtccccatcctcaagttagttacctagtgacctcatgctgagtcacctcattagcataacttcacctaaggtctgacaagagctgggaataacaaaacacattcccatcactcggaaaaatccaaggagtttaggactactttgccaggacctagaaataatgaccaaggcgggtgcagccgctcacgcctgtaatcccagcactttgggaggctgaggtgggcagatcatgaggtcaagagatcaagaccatgctggccaacatggtgaaaccccgtctctaataaaaatacaaaaattagttgggcgtggtggcacgcgcctgtagtcccagctactcaggagactgaggcaggagaatagctagaactcaggagtcggaggttgcagcgagctgagatttcgccactgcactccagcctagcgacagagtgagactccatctcaaaaaaaaaaaaaaaaagaaaaagaaaaagaaacaatgaccaaatatgttttaggctgggcatggtgactcacgcttgtattctcagcactttgggaggccgaggtaggagaatcatctgaggtcaggagttcaagatcagcctgggcaacatggcgaaactgtctttacaaaaaatacaaaaattggctgggcgtggtggtgcacgcttgaagttccagctacttggggggctgaggcaaaaagattgtttgagcccaggagatggaggttgcagtgagccgagatcatgccactgcacttcagcctagatggcagaacaagactctgtttcaaaaattaaaaaggaccaaatatttttaaaaattatatcacagacccaaataaactctcagattcataaaccctttgtccagcaggcagaaccaaaaggtgtctttctctaagtcagccccaacagactttcaaatttgtacaatattctgattaaacaaacacagtgaatgtaaaaccagacttctaataatgttgaatttaaccccagctctgtaatcctggttaatagctagaattaaataaatcaccttaggccaggtgaggcggctcacatctgtaatctcagtacttagggaggccgaggcagccggatcacttgagcccacgagttcaagaccagcctgggcaacatggtgaaacctcatctctatgaaaaatacaaaaattagccgggcctagtggtgcatgcctgtagtcccagctactggggaggctgaggtgggaggatcgcttgaggctgggaggcgaggtggagttttgtagtgagctgagatcatgccactgtactccagcctgggaaacagagtgagactctgtctcaaaaaaaaaaaaaagaaagaaagaaaagaaatcacctcagtcttctaccacctaagtcctgtgtgttctgaacaaacagctgaatgcagtgtaacactctccgcattgcttcgactatgccccctttttaaacctgtaacaagaccaaaaaccccaccaaattcccactttgcctcagaaatgattagctgaacaattctgtcttcaccaaccaggctgcacaaaattaatgtagagcaaactttccttaagtttctcttcctcctgctggactcagtctgagccagcacacaattcctctcatttatttattttgagatggagtcttgctctgtcacccaggctggagtgcagtggcacgatctcagctcactgcaacctccacctcccgggttcaagcgattctcctgcctcagcctcctgagtagctgggactataggcgtgtgccaccacacctgggtaatttttgtattttttagtagagatggggttttgccatattggtcaggctggtcttgaactcttgacctcaggtgatccacctgcctcagcctcccaaagtgctgggattacaggcgtgagccatgcgcccatccacaatccctcctttttaacctctcctaagaactgactgaagtcaaggtgaaacattctgtgatgtaggatctgattttcaccttccatcttactctctctcctaccttctagatttctaatattgtttgctcttcactttgaaaagcaattttctggctgggcatggtggcttattcctgtaatcccaccactttgggaggccgaggtgggctgatcacttgaggtcaggagttcgagaccagcctggccaacatggtgaaaccccgtctctactaaaaatataaaaattagctgggcgtggtggtggtcacctgtaatcccagctactcaggaggctgaggcaggagaatcacttgaacctgggaggcagaaattgcagtgagctgagatcacgccactgcactccagcctgggcaacagagcgagactccatttcaaaaaacaaaaaaaaaaaaaaaaaaagaaaagcaattttctgcctaaactttgagattcttgtagatcttatagttggtagttttctccttttgcaatatgcttttagagtgaagtcacttcttgcccaaatccagatttattttacttgagaatgtctagcaacagtgccacaacagtaacaaagacctcagacagggcatcacaccacatgtctctgcctgtggatctccaactttccagtgctctgcagcttctctcagtataaaaggctcctcccatgtttggaatgaacaggttgggacacctgccagggaggttccccaggaagaaccaactcaactgggtcttcaatgacctccctttgcaggctccagattgaccttagctcagagtcagtcgcctcaggcttctccaccccagtcaaggctactcacttacccttacatgccttacatgggtatttaaaaaaaaaaatacccatgtgtgatgaatccagtaaaatcactccaatccagcatttatgtttataggagggaagaaaaccacaacgcatctatattttatagcttaatagaaaaagcacaagtatctatccgtttcagaaaacaaatgtcattaatttatcattttccataataataaatcatttagtaaatgaataatgatatttgagttctttagctgttggaaagtcctgtcccacagaatttagcattagtctgtcaagtccacataacaggaacagaatagttatccactgtctcaaattctccactctacaaaggagacgaactaacattttggtaaatctttataattcatcaatatatccaccacactttcttgcaaaaatgtattcatttttctgcagtcataaaggaaaagtttttcccaatttctgttcactgctaggccctgaaattccgtttgaaatcatccaataaaaaaacagacctgaggctgggcacggtggctctctcctataatcccagcagtttgggaggccaaggcaggtggatcacttgaggtcaggagttcgagaccagcctggccaatatggtgaaacctcgtctctactaaaaatacaaaagttttagctgggcatggtagcatacgtctgtaatcctagctactcaggaggctgaggtgggatgattgcttgaacccaggaggttgaggctgcagtgagccaagatcccaccactgcactccagcctgggtgacagagcgagactccgtctcaaaaaaaagtaaataaaagttttaaaaagaaataaaatataggactaaatatgtaatgagtttgctgaaacccaacttgttcttgtctctttgaacatactttatcttctttattaagctctaatgataaaatgcattttgcagttaataaaaagctgaaatgagtgaacaaatcttttcaagatgacaaatgcagggaggggctgactggaacacagacaaatctgactactttagtgtcagttcaggtcctcttatcacttgggacatctcccaccccagtgctgctcactgaactgctgagtaattaccctccaaggagaagctccctcaataccgccaaccagctggctcatcagccatgtgtccccagggaatggaaactggggtggggaagaaaagctgaatgtcttaagggctttgctttttgaggaacagtataccaggaaactcctcccaccccacgacatccagctgctcccctataaggtcccaccccccacctctggctgtcctctgggaggagtgactcaaagctgatattcactagacactacaaaagacttagcagctatgagcatcttggagcagccccaaacagttctgtaacccaggaccaggacaccatagagggtgggctgacagatcaccctgtgccatttgcaaagaggaacctcgactgaaaatattcgggtatctctgtgtagacaagataaaggacagccacacatgcactattttttttttctttttcttttttctgagacggagtttcactcttgttgcccaggctggagtgcaatggcgtgatcttggctcaccgcaacctccgcctaccgggttcaagcaattctcctccctcagcctcccaagtagctgggattacaggcatgagccaccaccccggctaattttgtatttttagtagagacggagttcctccatgttggtcaggctggtctcgaactcccgacctcaggtgatccgccagccttagcctcccaaagtgctgggattacaggcgtgagccaccgcgcccggctttttttttttttttttttttttcacactggagtcaagtggttattctttgcttcctcacatgtgaaatgttcacaaacacaaaaacacatcttttaaaaagagccatacattgctatgtgaaaagaaagtgacaattaaaataatgcctctgtttgaaatattgcctgagggacaaagagttcataaagttgctgggaattgatgagagacagttagcctggggaaggctctgaaaaccaagagatttgctgccagccctaggaggagttaggatgaggggatagggtggtggatttgagaccctgctgcccacatctttggaagactcggagggaaaccggtcacctttgggaagaaagaagggactggggaacccacagatcacagcttctcttccaaagcacaaagcccacacacacgagtctggattctgcctggtgaccctccgttgtcaccgtgcagcgtcctcaccgggttcacaggaactgcgagccaggctggaggcgagattgcagttagatattaaccaggtgccctcagccccgctgcctcacggggccgcctccctgagagtcaggtcacagcagacgctgaccgccggcttcctcatcgtgcccggggataagatctcttgagagttgctcacgggtcgcctcagttctttctcggatcctgaattgcagcggaaaggctggcgccaaccaggctgaagaccccacaagggaacccactcagcagaatgcggtttcttcacctccagtcccaggagtcacctctcacttctccaccaaccagcgaccccacactccagccgtccctgtccacacctctaaacaccccatccccaaacctctcagggaggcggatctggggtgtcctcccctctcccccattaaactgtttctgctgcagccttcggcgtctcggtgcagtgactcgggccgtgaacctgtgccggttacaactgcacaatctggggagacgcggagctgcgggcgcggagctgcccagagagggcgccggggccggggccgcagcggccgagcagggacgggacaggacgcccggggtcccggctgccgccccagccccatcttgcggcccaggggaccaagggcagagctgcgccaggggcactgggatttgcagaccccggagtcgcccagggcgaggcccgggtcccctcacggtcggttccggccggttccaacctgccccttctttgcctcgggacgccgggccccgcacactcaccatttcccagcttccaggtgtccgggtgtcctccttaaaagccagtgtgggtcccagcgcgacagacgctgatacagaccttccagggcgtctctctctcagcgccagagccaggactcagagcgcaggggcgtggagaagactccgcgggctctttgaacgtcgcaccctcctccctgcagcgtgcctgattgacagttctcacaatccccgccccctcatccctgattggatagtgctccaggtcccgccccttggtggctgattgacagaagaagcgatctcacagtgctgagtggagccggatgaacaggttccaggcacgacccttggcaaggcgggcttcctcccaacggagtgacctgacccctcccgaagtgacgtttgcattttagaatttcctgattgtattcagtgggttcttcctgctttttcctcctggacagggactcacaagtgtgtgcagggaattccaggctccctgtccagtggagccattcccggacctcggagcaggaggggagcccggggcacacaggccaccctgcagcaggagggagggcctgatgtcctccagggatcaggaatttgggatgaggctgttggcgacgttgccaagcctttccctcaccttatctctcaatctactcattttcagcccagaagataaaaacaggacaacaaaataaaatagttgagtatgtggaaaaactggaattatatggcagcaatatttcataaagaatcaaaagagaagaaaagcaaaaacttgaacaagctcagagaagcagcctactgcactcacagttcacaagcagaccccctttcaggaggtcaaacatatccccaagctgggaagccaggcaatgattcctaaaatggagctccggggtggatcagaagctggtgataagggagggacaattaagaattttactctgaggtctcaaaatacctgtcccctctgcacagcgtggaaatgctccctccttatgccattaaatgttaatgaattaaacgctccaatcaaaagccaagacatcacactttgaatttgaaaacattagcctttctccatatgtttatgaagtaaaaatactagacttaaaagcgttatggccgggcgcggtggctcacgcctgtaatcccagcactttgggaggctgaggcgggtggatcacctgaggtcgggagtttgagaccagcctgacaaacatgatgaaaccccgtttctactaaaaacgcaaaattagccgggtgtggtggcacgctcctgtaatcccggctcctcaggaagctgaggcaggagtatcgcttgaacccggcaggcagaggttgcagtgagccgacatcacaccactgcactccagcctgggcaacagagcgaggaaaaaaaaaaactccatctcaaaaaaaaaaaaaaaaaagcgttatgaactagaagctggtagccatggctaaatagaaaggagctgaacatgagatgtcaatagatgaaatgaaatcttcaatcaacttctagaaactatagcattttctgccaggacaaatgggcacgtttagaaaatgaatgaaaaaaatgacgtctgagtataacctaatgcataaatgatactgtttccttaaaaaaaaataataagcacacacacagacacacacacacacactcccacagtctattatgctagaaactgctctctgaaggataaactactattttatgaaatgctccacccctcactcctcacattaactgctcctggaacaatgttctatttatttgtttccacacatattaaaagagggcacaatgtatcaaactaactgattgtcaggggtttatatacagattctgtatatttttacaaatggcaacaagtaagtagttgatttctgcaatgatttaaatacatataaaagcttccagacaaaaatagctgttcgcattaccatgatgaaggaaaaatcaacaatggtgagacccacaccccctcccccagagaaagtataaaagaaatcctaagagaagctagaaagcccaaaatttgtatgtgcaagtttaaacacaatatagaaagtattgctgttagtttcctcacagtcagttctatggcaacaccatgcttttctgagttaggatgtttatttctgagtttgtcttttttttttttctgagatggagttttgctcctgttgcccagactgaagtgcaatggtgcaatctcggctcaccgcaacctctgcctccgggttcaagcaattctcccacctcagcctcctgagtagctgggattgcaggcatgcgccaccacatctggctaattttatatttttagtagagacagggtttctccatattggtcaggctggtctcaaactcctgacctcaggtgatctgcctgcctcggccacccaaagtgctgggatgacagttgtgagccactgcacccggctatttctgagttttttaaaagaaaaggaaacacaactccttccccaaccctctgtcacgaagatatcctctaatatctgctgctaaatgtaccatttcagtgtgagttaactttaatgcatgcagtaaggagctcagttcgtgtttctgaaggtcaatattcaacttccttagtagcttgttgaaaagactttcccctttaatttatcttggcctatttgttgaagattaattaactatccatgaagagtgtcttagtccatttgtgctgctataatgaactactgccaagtgggcaatttataaagaatattaattagttttctcgtagttctggatgctgggaattccaagataaaggtgccagcacctagggagggccttcttactgcatcttctggagggaaggaacactgcatcctcacagggcagaagacagaagggcaagagagggcgagccccatccatcaaaccctttatagtggcattagtctattcatgagggctctgccaaaagactaaaagtccccaactcccaaaattgtggtgctggggattgagttctcacctatgaattttgaggggacacaaacattcaaatgatagcaaagggggttatttccggactctcaattctgtcatattatttctgacatcttcccagtaagtctggctactatactacctacctgatgatggagagccccaccccattcctgacagtcaagcatgacacatgactgtcatgcacagatagaaacggtcctaaagccacaggaagatctcctagacacctccttggatgacctagacttactatcattttgagaaggcctctcttaacacaattgtagggaaaacatagtaactggttttgccataatttctccacatgaaacaattgaggcatactctttactcactgtaaaatcagcctgagcctctagctcattgctcttactagatctcgaatgttggcaaaggggaaactgccaccattgacaatgattccagatatgctttgggagtcttttttgccattggcacaatctgaaaatcctttgcatttacaacttgttctggtacacccattgccaatgaacatacataactggggcactattacaggttgttcacctctctactaaaatggctattgttcactgtctagcccatactaaggagacttctactacatctctgggcattaaaagactgctaaacaaggcggggcacaatggctcacgcctgtaatcccaacactttgggaagctgaggcaggtggatcacctgaggtcgagagttcaagaccagcctggccaacatggagaaaacccatctctaccaaaaatacaaaatgagccggcatggtggcgcatgcctgtaatcccagctacttgggaggctgaggcaggagaatcacttgaacctgggaggtggaggatgcagtgagctgagatctcaacattgcactccagcctgggcaataagagcgaaactccatctcaaaaacaaaacaaaacaaaacaaaaaaagactgctaaacaggaagccaaaaatggcaccttatctccgctgaattcacaaacctgcctttagccttgatttatgttatcaagtaaaagctcaataatcggaaaaacatcaataggtacaaaggggagacaactattgcacagattatacgttaggccaatcacactgtagctcctttcttttgatgttctgccttgtgctaatcttccactggattggacatggacgcaaatgatggatacttaatagtctaaaaggcaactggctctgtctgccttggcatgcacaaaatatctgacccaattatttcccagtgtgctgcttgtaaacttgcccaattgctggatgaaaccaacatacctcagagaatcctccaatgcccatgctgcccctcacaatattccagatggattagcttctctccagcttgaggccattcccattgtttggtggttgtctgcatgtttaatggatgggctcagtgctgtacagctacacatgctcatgtatgaatggtgaagtaattaataactgaaattatttctcattttggcatgcctttgtaggctgaatcagaccatggaagtaattattattattattattattattattattattttattttttatttttttttttgagatggagtctcgctctgtcacctaggcttgagtgcagtggcacaatctcggctcactgcaagctccgtctcctgggttcacgccattctcctgcctcagcctccagagtagctgggactacaggtgcccgccaccacgctcggctaatttttgtatttttagtagagacggggtttcaccgtgttagccaggatggtctcgatctcctgacctcgtgatcctcccgccttggcctcccaaagtgctgggattacaggcgtgagccactgtaccccatggaagtaattttatagctgatataaaacacattcttccaaaaactatggaggacttattaaaattttacaccatccttaatcatcagggcaaatgtaaaaatctaaacatacagggcaagaggggctttagggtaatatctgtcagaacacaggatatcaatggccagaagaagaaaatatgagctgacactttgctgggtggaacattatgatgtacccctgcctgccatcaaaataagagccattgtcattcaaaataagaaccatgttttatatataagagctatgaattcatgtaagccatgtcaaacttgacatgtatcagcatttcaaggacaattggaagaccatttctacaggtaaccaccaaggaagatcgtcagagccaattcccaggctccagaaataaatggcatcacaaaatatagataaaaacaaacaaacaaacaaaatgacctgactcaaaataaacaaaggacttgaaataaagttgtttggccaggcaccgtggctcacgcctgtaatcccagcactttgggaggctgaggcaggcggatcacctgaggtcgggagttcgagaccagcctgaccaacatggagaaaccccatctctactaaaaatacaaaaattatccaggcgtggtggcgcatgcctgtaatcccagctactcaggaagctgaggcaggagaatcgcttgaacctgggaagcggaggttgcggtgagccgagatcatgccattgaactccagcctgggcaataagagcgaaactccgtctcaaaaaggaaaataaataaataaacaaagttgttcaaagaagttatataaatgacaattatgtacatgaaatgatggtcaccatcattgatcgttaaggaaatgcaaatcaaaaccacaatgaaattccaattcacacccattagcatggctattatacagccaatgtgggagaagacggaagaaatggcaactcttttgcattgctggggagaatgttaaatactgcagccactgtgtaaaacaggataagtattcctgacaaaggtgaacttagaatttctctgtaacccagccattcaactcctaagtatacacccaaataaatagaaatcagaaacacacatggacacacgtaacccaatttcatggcagccttattcacaattcccaaaacagtattgtggatataacccatacgttcatcagcctatgagtgaagaagcaaagtgtggtttacccataaaatagaatgttcaggcataaaaaactgaatcactggtacattctgctgcatggaagaaccttgaaaacattttgctaagtgaaataagtcagacacagaaggacaaatattgtaggcttttacttagaatacctagaatagtcaaattcatggagcaaaaaagtagaagagagattatcagggcctgacaataaggtggaatgaggagttcttttatttactgggtgatgagtttctatgtggagtgatgaaaagttctggagatagctgcagtggtcacactgagtcataaatgtatttagtgctactgaattgcacacgcggttgctcacacctgcaatcccagcactttgggaggccaaggcgggcagatcatgaggtcaggagatcgagaccatcctggccaacatggtgaaaccccgtctctactaaaaatacaaaaattagccgggcgtggtggtgggtgcctgtaatcccagctactcaggaggctgaggcaggagaatctcttgaacctgggaggcagaggttgcagtaagttgaggtcgcgccactgcactccagcctggctacagagtgagactcctcctcaaaaaaaaaaaaaaacatttcaatggcaaattttatgttagtatgtgttacttcaacacaatttataaatgaaagacaagacacaattccagttattagagatgaacgtaactatatctgggataaaaacatacactggataggactgtgcatattggtatctacctgtagctactctggagtctgaggtggcaagatcacttgaacttaggaattaaaatccaactgtggcaacatagccagacctcacctctaaagagaataataataaaataataataatacactggctgaagccacatatggtggttcatttctgtaattccagctacttgggaggatggtgtgggaggatcccttcaggccaggagttcaagacctgcctgggccacatagtgagaccttgtctctaaataaattttaaaacttagtacagtgtggtggtgcatgcctgttgtcccagcaacttgaaggctgaagtgggaggatcacctgagcccaggaatttgatgcttcagtgagcatgatcacatcactgcataccagcctgggtgagagagcaagaccacaacttaaaaaaaaaaaaaaaaccagagagagagagaatagcagtagaaagtatttaaaatgaaacaccaatcaaaaaaatgaccaaaaaatatgaacagaacatcagtgagctgtgtggtggtgactacacagctacaagtaacctttttttttgagacagagtctcactctgtcgccaggctggagtgcagtggcgtgatcttggctcactgcaccctccgccttccaggttcaagcagttctctgcctcagcctcctgagtaactggaattacaggtgcccaccaccacacctggctaatttttgtatttttggtagagacagggtttcaccatcttggccaggctggtcttgaattcttggcctcatgatccacctgcctcgggctcccaaagtgctgggattacaggcgtgaaccaccgcacctggccaacatgtaacttttaaaaaatgatcagaggccgggtgtggctcacgcctgtaatcccagaactttgggaggccaaagcaggtggatcacctgaggtcaggagttcaagaccagcctgactgacatggtgaaaccccgtctctactaaaaatacaaaattagctgggtgtggtggcacgtgcctgtaatcccagctatttgggaggctgaggcagaagaattgcttgaacccaggaggtggaggttgcagtgagctgagatcacgccattgcactccagcctgggcaacaagacgaaactctgtctcaaaaaaaaaaaaaatcagactgtcaacaatcagttgtgtgatgggacaactacaaggactcctaaaaaggcaggaggaaacatagaataaaaatttttgttaaaaatatatcagccatggccaggtgcagtggctcactgcactttgggaggccaaggcgaacagatcacttaaggccaggagttcgagaccagcctggccaacacggtgaaaccccatctctactaaaaaatacaaaaattagccaggtgtggtggcgcatgcctgtaattccagctactccagaggctgaggcatgataatctcctaaacctgggttgtggaggttgccagtgagctgagattgtgccactgcactccagcctgggtgacagaatgagatgctgtctcaaaaaaaaaaaaaaaaatcagccacacattttccaaattggatgaaaactataaaccttgaaatacaagaagctcaacaaaccacaagcacaaaatgtatgaaaaaaatctacaccaagacacatcatcatcaaactgctgaaagtcagagataatgaaaaaattttaaaactggagaaaaacgacaccttaactatagagacacaaagactgattacatacttatcatcagaaacagtccaaaccagaagaccagagaaaaatttttaagaaactaaaaaaacaaatatgtcaaccaagaattctatattcagcaaatatctttccaaacaaagagaaaataaatactttactcagtcatgctaaaagtgtttgtaatcagcatacttgctgattgtcaattgaattcccagagcagaagaaaaatgttaccagatggaaatctgtgaagaatgaaaagcatcagaaatgctaactacttgagtaaatacaaagaagtttttactactgtctatttttagaataaaagatcactgaatttgtaaaagaaaaaaaagttgggggaaagcatgggaaaaaatgggggaagcatttatcttttggcttacaaacaatccaattttatgctgttaattattttaagtgcataactagattattgttaactataatcatcctgttatgttatcaaacagtaggtattatttaatctttctatttttgtgcccattaactgtccccacctctccatcaccaccccactagtcttcccagcctgtagtaaccatccttctactttctatctccatgagttcaattgttgtgaattttagatccacagatgagtgagaatatgcaatgtttgtatttttgtgcctggcttatttcatttaacataatgatctccagtcacatccatttgttgcaaatgacaggatctcattctgtttttttaagggaaaataaatttattaagaaagtgaaggaataaaacaatggctactccataggtagagcagccttattttttatggctgaataatactccattgtgtatgtgtagcgtattttctttatccatttatctgtttatggacacttaggttccaaatactagctattgtgaacagtgctgcaacaaacatgagagtgtagatgtctcttgaatatactgatttcctttcttttgggtatatacccaacagtgggattgctggatcatatagtagctctatttttcattttttgaggaacctcaaaaatgttctccatagtggttgtactaatttacattcccaccaacagtccatgatggttccctttttctacctcctctccatcatttgttattgcttgtcttttgaatataagccattttaactggagtgagatgatatcacactgtagttttgatttggatttctctgaagatcaatgttgttgagcaccttttcatatgcctgtttaccatttgtatgtcttcttttgaaaatgtcaggctgggccgggtgcagtgggtcatgcctgtaatcccagcacttggggaggccgaggcgggcagatcatgaggtcaggagattgagaccgcagtgaaaccccgtctctactaaaaattaaaaaaaaaaaattagccgggcgcagtggcaggcgcctgtagtcccagctacttgggaggctgaggcaggagaatggcatgaacctgggaggcagagcttgcagtgagccgggatcccaccactgcactccagcctgggtgacagagcgagactctgtctccaaaaaaaaaaaaaaaagaaaatgtcaggctgggtgtggtggctcacacctgtaatcctagcactttgggaggcctaagcgggtggatcacctgaggtcaggagttcaagaccagcctgaccaatatagtgaaacctctactaaaaatacaaaaattagccaggcatggtggcttgcgcctgtagtcccagctacttgggagactgaggcaggagaattgcttgaacctgaaaggcagaggttgcagtgagctgagactgcgccactgcactccagcctgggtgacacagcaagactccatcccaaaaaaaaaaaaaaaaaaaaaaaaggctattcaaatgtttgtcccattttttattggattattagattttttcctatagaactgtttgaatttcttatatgatgtggttattaatctcttaacagatgagtactttgcaaatattttctcccaatctgtgtattgtttcttcactttgtggattgtttcctttactgtgcagaagatttttaacttgatgtaatcccatttgttcatttttgctttggttgcctgtgctcatcaggtattactcaagaaatcttttctcagacctgtgtcttggagagtttcctcattgttttcttgtagtagtttcctagtttgaggtcttagatataagtctttaatccattttgattttatttttgtgtgtggtgaaaggtaggggtctagtttcattcttctgtatataaatatccagtttccacagcaccatttattgaaaaaactgtcttttccacagtgtatgtttttggcacctttgtcaaaaatgagttcactgtgagtgtgtagatttgtttctggattctctattctgttccaatgatctatgtgtctatttttatgccagtaccatgctgtttggattactatagctctgtagtataatttgaagtcacgtgatgtaattcctccagttttattcgtttcacttaggatgacatttgctattctgggtcttttatggtcccatataaattttagaatttttttttctatttctgtgaaaattgtccttggtattttgatagggattgcactgagtctgtagattgctttgggtagtatgaacatcttaaaaatattgatttttccaatccatgaacatggaatatctttgcatttttttggtgtcctcttcaatttctttcatcaatgtttttatagttttcattatagagatctatcacttctttggttaagttcattcctaggtatttaattttatctgtggctattataaatgggattactctttggatttctttttcagattgttctctgttggcatacagaaatgctactgacttttgtatgttgatttttttatcccacaactttactaaatttgttcacagctctaatagttttttatagtctttgggtttttccaaataaaagaacatatcatctgcaaacaaagataattggatttcttcctttgcaatttggatgcccttaatttctttctttctgtctttcttattatctgctccagctaggactttcagtactttgttgaataacagcaatgaaagtggcatctttgtcatgttctagatcttagagaagactcaattttttccccattcagtatgatattagctgtgggtctgtcatatatggcttttattatgttgatatatgttccttctaaacccaattttttgagggcttttatcattaagggatgtttaattttatcaaatgctttttcagtattaattgaaatgattatttgttttttgtccttcattctactgatatgatgtattctgttgattgatttaagtatgtcaaaccaaccttgcatcccaaggataaatcccacttggtcatgatgaataatctttttcatgtattgtagaattcagtttgctagtattttattgaggatttttgcatcaatctgatcagagatattgacctgtagtttctttttctgatgttttttctagttttggtgtcagagtaatactggccttgtagaatgggtttggaagaatttccttctctattttttttggagtttgagtaggactggtattagttcttctttaaatgtttggtagaattcaccagtgaagccactgggttctggcctttttttttttcctgggagaatttttattacagcttcaatctcattacttgttattggtttgttcaggttttgggtttcttcatggttcaatcttggtaggtagtatgtgtctaggaatttgttcatttcttctagattttccaatttattggcatatagttgctatagtagccactaatgatcctttgaatttctgtggtatcagttgtaatgtctccttttccatatcttattttatttatttggatcttctctcttttttcttagtgtgtctaaaagtttgtcaattttgtttaatgtttcaaaaaactaacattttgttttattgatcttttgtgctgttttcatttcaatttcatttatttctgctctgatatttattatttattttgttctactgatattggatttggtttgctcttgcttttctagtttgttaagatgcattttgtttatttgcagtttcacttttttgacttatagtttataaacttatagctataaacttctctgtcagtactgcttttgccatatctcataggttttggtatgttgtgtttccattaggatttttttctagaaagttttcaaattttcttcttaaagtcttttttgactcactggtcattcaggagcatattcttaatttccatttatttgtctagtctccaaaatgcctcattattgatttttagttttattgcattgtggccagagaagatgcttgatactattttaattttttgaatgttttaagacttgttttttgacctaacatatggtctatttttttagaataatccatatgctgagggaaataatgtgtattctgcagccatttgatgaaatgttctgtaaacatctattaggtccatttggtctacagtgcagactaattctgatgtttctttgtgggttttctgtctagaagatctgtccaatattgaaagtggggagttgaagtctccactattattgtattggtgtttatctctctctttagctctaataatatttcccttatatatctgggtgcgccagtgttgggtgcatatgtatttaaaattgttatatcctcttgataaattgatccctttatcattatatagtgaccttctttgtctcattatagtttttgtctggaaatctattttatctgatataagtatatctactcctggtctttttttgtttccattggcatgtcatatctatctttttccactacttgatttgcagtctatatgtgtctttacaggtgaggcatgtttcttgtaggcaacagatcattggattttgcttttttattcatttagccagtctatgtctttttattggagagtttagtccatttacattcaatgttatttttggtaaggatggacttaatcccgccattttttcattcgttttctggtcttctcttccttctttcattttttcctgtcttcctttttgtgaaggtaatttttttctaatggtagaatttaatttcttgctttttgttttttatgtatctgttgtaccttttttaaaatttaaggttaccatgaggcttgcaaacactatcttagaacccattattttaaactgatgacaacttaacagtgattgtataaacaaacaagagaaaagaaaactcatgaaaactctacactgtcccacactttaaaactttttgttgtttctatttatatctactgtactgcccatgtcttaaaaattatagttattattttttgagtgattcatcttttagtttttctacttaagattaggacacacaccacaattacagtattataatattaatattttgtgtttttctatgtacttactactaccagagacttttttctaccttcagaggatttcttattgctcattaacatccttttctttctaacagaaaaactccctttagtatttctggtgggatagtctggtgttcatgaaatcccttagcttttgtttgtcttggaaagcctttgtttcaccttcatgtttgaaggccattttcaccagatatactactttagggtagaagtttttttcttcagcacatttaaaatatggccatgccactgtctcctggcctgtaaggtttcccttaaaaagtcttctgccagacattggaattccattgtgttttatttgtttcttttctcttgatgcttttaggatcctttctttatacttgacctttgggagtttgattattagatgccttgaggtagtcttccttgggttaaaactgcttagtgttctacaaccttcttgtacttggatattgatatctttctctaggtttggaaagctctctgtcattaaatctttgaataaactttctacccctatctctttctcaccctcctctttaaggctaataactcctagatttgcctttttgaggctgtttcctagatctcataggtgtgcttaattcttttttattctttcttttgtctcctctgacagtattttcaaatagcctatcttcaagctcactaattctttcttctgcttgattcattctgctgttaagatgctatgatacattcttcaatatgtcaattgcatttttcagctcaagattcctgcttgattctttttttttttttttcgagacagtctcactctgtcactcaggctggagtgcagtggtgcgatctcggctcactgcaagctccacctcccgggttcacgccattctcctgcctcagcctcctgagtagctgggatcacaggcacccgccaccatgcccagctaattttttgtatttttagtagagacagggtttcaccgtgttagccaggatggtcttgatctcctgacctcgtgatccacctgcctcagcctcccaaagtgctgggattataggcgtgagccactgcacccagcctcatacaagagttttgattaattcacatagttgccagcatttgttattttgttgttcttaggtagtagcaaaataatgaaggtgagggtgtgtggatgtcattgctgttttgatttgcatttccctaaccatgagagagagatgttgaacatctttatgtgattatcaccttttgtatgcttcattagaggaatgtctattcaattccctaacatatttttcaacgtaattgtattttacccagcatgggctgctgaaataaaataccaagtattgagggtattaacccaccaacttttaattctcactgtacaagaaattattaagtaagtccaaggtcaacgtaatggcagattcagtgcctgataagggtctgcttcatggtacaagcaaggctgtcatctcattgagttctcatatggtgaagagcaaaagaaagctacctagggaatcttataagcccattcataagggactaccctcatgatctcatctaattctaactacctccctgagatcccatatcttcattccatacattaggaagtaaggcttcaacacttgaatttcaggagacaaactcaataattttctaccctgcctccccaaatttatatccctacatgcaaaatacatttatttcatttcaacagcatcgaaagtcttgagtcagtccacgattaggtgtaaagcctaaactcaaactccattaaatatcatctgaatcagatatgggtgagagttgaggtaacattcatcctgaggcaacattcttttccaaatgtgagccttagaaaacaaaccggttgtgtgccctagtgttgagacaggcttaggaaaacacttctatttcaaagaagagaaatatgaaaggaggaagtggtgacagttcccaagcaagccaaaaacccagaaggtaaccttcatataagaataatcctctttgggccaggcatggtggctcacgcctgtaatcccagcactttgggaggcggaggcgggcggatcttgaggtcaggagatcgagaccatgctggctaacacggtgaaaccccatctccactaaaaatacaaaaaattagcctggcgtggcggtgggtgcctgtagtcccagctactcgggaggctgaggcaggagaatggcgtgaacccgggaggcggagcttgcagtgagccgagatcgcaccactgcactccagcctgggagacagcgagactccgtctcaaaaaaaaaaaaaaaaaaaaaaaaaaaagaagaagaatcctctttgactcaatattctggaaaagagattggtgggaaaggctctctgacatgatcaaggatgactgaaaaacttacacaaaagcaaagacaaatctttactaacaaggaactcaaaagatcttctgaaatcctctacaatgacaacaataatgacattatgatgatgtagaagatttaaaagatgcagagccattgattgggacctgaacgcattgcagcagtttttcaacaggcagaggtgttaaagattattatcctcaagtaagatccctcagtggagcaaagtctccacctcacctgagtaattacaacatgcctacaaacacagtagatgattcaaagaaataaaggaataagattcttataacaacatttctaactaagcatttgcatatatgaagactgaaccctcagtacttatagatcttcagccctcaagccaaacagatcctgactgtattatttagcctcctccaaagagtcaacatctgcaatcagaaccttgttcttataacatagatgattgttcggatgttctgtcagaagattccatttaacctgatctctcactacgtatctacaataccacatgtctagccacctcaacaaatcacagtgttaggcaccatacagtgatcatcatcactatcactatacctgggtaatcaagagagacaaactaggattttgctgaatattaacatactctttcaggtcaattctcaaaaggaatctgtgtgtattgaaggaaattgtaactttctggctgacatgtactatttagggaggcctgtgatggttgccctgtactgaataagtatagactttttctcaataattccctaagcaatataataactatttacatagtatttacaatgcatgaagtattataaataatctaaaaatgatttacagtgtgcaggaggatgtgcataggttacatgcaactatgtcatttttaaaaagggactttagcatctgtggattcaggtatccttgggaggtgatagaaccaatctcttgaatatatcaagagataactatattcaaaataaatggaaactacttaagtctttataacatctttatattcatagggcttatctccaatgtgaattcttcctcatatcttaaataaaataagattagcgaatgcttctcccacattccatacatttagagggtttctctttagtgagtccttttatgtccattaaagtaagtgggagaactgaatgctttttcacatcccttacattcatacagcttctctccagtgtgaattttttcatgtatacaaagggaactggaaaaactgaaggctttaccaaattgcgtacaatcatggttttgtttccagtgagttctttcatgccttaggagggaaaaggacaaaaacaaaatgctttcttacactccttacgttcatggagtttctttccagtgtgagtcctgtaatgatttcaaaaagaacagacatcgctaaaggctttcccacatttacatttacagtgtttctccccagtgtgtgtccttttatgtctttgtagaaaactggaagaatcaagggctttctcacataccttgcatgtctgagatccatctccggtgtgcgttttcatgtgtctttgaaagcttgtgcatgaaagaaggctttcccacattgcttacatttatagggtttctcttcagtgtgagttctttcatgtctttgaactaaactgagataatgaaagcttttcccacatatcttacatttatgatttctacttccagtgtatgttcttgtgtatatttgaaagcctctgagatgataaaatgcttttacacattgcttaccttcatagggttgttttccagtttgagccttttcaagtatttgagtgtaacagaaaccactgaaggctttcccacattgtttgcatttataaggtttctctccagtgtaagttctttcatgtctttgaaatggtctgtgagaattgaagcctttcccacatatcttacatttatgaggcctatctccactgtgcattctcatgtgtgtttgaaagcttctgagacgattaagtactttctcacattccttacagtcactaagtttctttccagggtaaggcctttaatgtattcaaaggaagtggcaataactggaggctttctcacattgtttatgtgtatgtggcttctctccatattcctgatactcatgtggcttgtgttgagcatgagctctatggtagcaattaagatgaacgacccatgctgacttctccacacacactgctttcacgtggttttgctcaagggagacttttttttttttttgagacggagtttcattcttgttgcccaggctggagtgcaatggctgatcttggctcactgcaacctctgcttcccaggttcaagggattctcctgcctcagcctcccgagtagctgggattacaggcattgtgccaccacgcccggctaattttgtatttttagtagagacggggtttctccatgttggtcaggctggtctcgaactcccaatctcaggtaatctgcctgcctcagcctctcaaagtgctgggattacaggcgtgagccaccgagcccggcctcaagggagatttttgttgttcacaataccacctggaatgtggctgaaagtttctccaaattatctacctcctttacttttacagaatcagtctaccatatgatatctgtaaaaacagagaagtacaattactacaggtttgtttataagtgttttttatatatattaataggtcttaaatttacattgttgacattatcatgcaaagcttaggtgtcatgccctgtttgaacatgaacggactgaatgctgtgcaagataactcaactgtggctatcatcggaacagtaatattcacgtgggaattcttagtactgttttccaaggaaattattttgcagacacacttaacagctatgtcccatttaagtatgtttttgaagaaaattttctaagagtgaataaatttaagccaggattattcttttttatttatttatttatttatttattttgcttgttttaaaattttcctgtctttttttttagacggagtcttgcactttcgcctgagctggagtgcaatggcatgatctcgactgactgcaacgtcctcctcccgggtacatgcgattctcctgcctcagcctcctaagtagctgggactacaggttcacaccaccacgcctggctaattttttgtatctttagtagagacagggtttcactatgttggccagactggtctcgaattcccgacctcctgaactgcgccccacccccccaccctttcaaagtgctggaattataggtgtgaaaaatttcctgtcactttaagaattattccaaagacatatctttctcttcctagggcaaattaccttagatttcttctgggaattttgtactaatctttaatgttttggtcttcccatttcattcctaaaatgtagacccagaagaatcactatatattattataaaattacattgaggccgggggcggtggttcacgcatgtaatcctagcactttgggaggccgaggtgggtggatcgtctgagctcaggagttcgagacaagcttgggcaacacagtgaaaccccgtctctactaaaaaatacaaaaaaatattagccgggcatggcggcgtgcgcctgtagtcccagctactcgggaggctgaggcaggagaatcagttgaacccaggaggcagaagctgcagtgagccaagatcgtgccactacactccagcctgggtgacagagcaagactccatctcaaaaaaaaaataataataaataaaaataaaattatattaaaaatgtaagattttatgtagactgcagttatggatgatttattcaccaaaccacagttgactcttcaacaacacaggtttgaactgcatagatctccttacatacaaattttcttcagtttctgctactactgagacagcaagaccaacccctcctcttattcagcctactcaatgtgaagacaataaggatgataacatttatgatgctccacttctacttaatgaaatagtaaatatagttttttctccttgtgattttctgattaacatttttctctgccttagtttattgtgagaaaacaatatgtaatgcatatgacatataaaatatgtgttaattgaatgtatatcttaccagtaaggtttctggtcaacagtaggctattagtagtcaagttgcgggggagaaaaaagttatttgaagatttgtgactgcattgagggctggtgcccctaatccctgcattgttcaagggtcaaacgtatttcttttatattctaaatctttgaacagcattggtgacgaagaaacaaatattcgtaattgactaagtaaagacatgatgtcccccttacctatacagtctaggttcctgatggtttcccgtagcacatctctgtagagactcttctatgatggacccagcaaagcccactcctcccaggcaaaagatcaaagccacatcctcaaaggccactgagtcctgaaacacccgacacgtgcagaggaggaaagctgaaactgacagcactgggaatctgtactcactacataaatgtcacatgatgctgtggtgtccaaacatttatgcaacgacacggtaatccaactcttaccctctttctaaactcattttctcccagaatgcaattctaatgctagaattaaacgtgtttggtaaaataacagtcgaattataaaatgccactccttggtgagttaaaggagtgacatttattgcctagatcacccctaatatctatgtgtacaggatgtttgtaattcctgatgtgacaaagtcctcctacctaatgggcagaagagttaacatcagctgtcctgagaccgcatattgttacaaatgcttgctcacaaagttgaacctttcactatatctaggaactaaatttagttagggggcttcaccaacataagcgataatggaggatgagtgtccctaaactatgtaaaaaatatggtatctgctgaactcctatgttccctctgagagttcaaacttttgtgatatgcttggcagagggagcatacctgatcattcactactaggttttttgcttgtttttgtttttgtttttgttttttttgagacagagtcttgctctgtctccaggctggagtgcagtggcgcaatctcggctcactgcaacctccgcctcctgggttcaagcgattctcctgcctcagcctcccgagtggctgggattacaggcgcacaccaccatgcccagctaatttttgtatttttagtagagacagggtttcaccatgttggctaggatggtctcgatctcttgacctcgtgatccacccacctcagcctcccaaagtgctgggattacaggagtgagccaccgcgcccggccattcactgctaggtttgaatgtttgtcccctccaaaatgcttgttgaaacataatcgccaatgtggcactaatgaaaggtgaggcctttaagaggtgagtagatcttaagggttcagacctcataaataaattaatccattcatgaattcatggcttactgaattaatgagttatctcaggagtgggactgatggccatattaaaaaagaagggaacctgagctaccacattcagcccattctccatgtgataccttcaaccacctagaaactctgcacagcccccatgaccaagaaggctttcaccacatgaagccctcttacttgctaggttccagaactataataaataattttttttgttgttttttggcttttctttttagatggactcttgctttgttgcccagatgggagtgcagtggcacgatctcggctcactgcaacctctgcctcctcctgggttcaagcaattctcctgtctcagcttccttagtaactgggactacaggtacatgctaccacacttggataatttttgtatttttaatagagacagggtttcactatgttggccaggctggaagaaatattgttttttaaataaattactcagcttctactattctgttataagcaacagaaaacatactaggataagcatgaaaaaaccactcaccactgggtctcttatgagctttttttggtagataacatttcccacattttgtcacaacttgttacttaaaggataaagcccatccaatctgaacacattataggagactatttggaaggtggcatctgctttcctctagaccaaattcagttaagtatgacaaaagactaatgaaagatgtctcactatcccaatgggaaacttacgctttttattgggtaataacaaaggataataaagaaggaaaaagattgcacatgttcactcctgtaatcccaacactttgggaggctgaggcgagtgaatcacctgaggttgggagttcaagaccagcctgaacaacatggagaaaccccatatctactaaaaatacaaaaaattagccgggcatggtggtgcatgcctgtaatcccagttactcgggaggctgagataggagattcgcttgaagaacctgggaggcggaggttgcggtgagccgagatcgcgccattacacgccagcctgggcaacaagagcgaaactccatctcaaaaaaaaaaaaaaaaaaaaaaggaaagaactcaatatcacctctcataaatatctatgctagtccctaaatccctaaaacagttgttttaatagtgaacaaaaattgcattagcaaatctagtaggaatcacaaatgtctaaaagtgagaaaaatgttggaacagaaacatgaaatcttgcctgaaatacataaaggattcaagggtgaaatatgcaagacactatactattaatcgagagataaacaaatagaaataggaatgtgaataatggtaggaaagcctagcagagtttttaaagtttcttcttattctaatctctcctccacttcagtgacagtcttgaggacaacagcctaggttcccagtgtgagatcctggtcactgattctaaagagagcagatcagatttaatgtgcaaattattgcctttgtatgttacaatctgttttgggcctttccaaaggtctcaaacaaggctgtcttctctgtttcatctatgttggaagccaattagaataaacactagcaggaacatcttaaaaattttacgaaaaacataaaaagcctgcaaccacattggactatagattatgattaagacatacactgaccagctaatggccaggaagaaaagctggagagaaaatttccctcagaacttgggatattcaaaagctcccaaattagccatggtggcatgtccctgtaggctcagctatttgggaagcagatgcagaaggatcacttgagcccaggagttcgaggctgtagtgagctataattgtgccactgcactccagcctgggtaacagagcaagaccccatataaataaataaataaataaataaataaataaataaataaataaaattaattaattacttatttaaaataaaataaagcacccagttataggaggtagtttcctgagacctggaagaagaaaaaaaaaaaaagcaccagggtatactgaggaattaagccccatgcagtcaaacgacagaaaaacacattttcacaaaagacccaagaccatcgttttcagatgtggcagatcttgaggcttggttaaacagaaagagaagggtgaagcagagctttaagcagctgggctaaggattcgaggaattctccagctcagatccatccacagagactgacagaggtcaattttttgcttgtttcattttctctttttctttcagtttctggcattgtcagaacactgggtgaatataagctaaagggacagagacctcagtgactacactggacagggaatacagtctctataaatacacttctgaaataaacaagattaccaaacaaataagcaattacagccttcagcgaacataaatcgcataaaaaagaagggggagaatttgatttacagagttactcttattataatattcaaatgtctagttttaacctttattttaggttccagggtacatatgcagtttttttatatagacaaacttgtgtcatgggagtttggtgtatagattatttcatcacccaggtactaagcatgatacttgatagttattttttcttatccttttcttcctcccacccttaagtatgcctcagcgtctgttgttcccttctttgtgttcacatgttcccattatgtaactcccacttattaagtgagaatatgtgatatttggttttctgttcctgtgttagtttgttaaggataatagcctccatctccatccatgtttctgcaaaggcatgatcttgttcttttttatggctgcatagtatttcttggtgtatatgtgccaaatgtgctttattcagtctactgttaacaggcatttaggttgatttcatatatttgctattgtgagtagtgctgcaatgaacataggtgtgcatgtgtctttatggtagaatgatccatattcctttgggtatgtggatccaataccccagtaaatgggtattggattgctgggtcaaacggtaattcagtttttagtgctttgaggaatcaccacgctgctttccataatggttgaactaacttaaactcccaccagcagagtataagcattcccttttctccacaaccttcccagcatctgttattttttgactttttattaatggccattctaactggtgtgaaatggtatctcattgtggttttgatgtgcatttctctaatgattagtgatattgggcattttttttttcatttgcttgttgattacatgcatgtcttcttttgaaaagtgtctttaatccatcttgagttgatttttgtatatggtttaagaaaggggttcagtttcaatcttttgcatatggctagccagttatcccagcaccattgatgagtccttccccactgcttgtttttgtcagctttgtgaaagatcagatggttgaaggtgagcagcattatttctaggctctctattctgttccattggtaatgtgtcagtttttgtaaaaataccttactgtagccctgtagtatatagtttgaagtctggtagcatgatgcctccagctttgttctttttgcttaggattgccttgactatttgggactttttaagttatttttttccaagaactaagtcttgcatttgctaatcttttgtatgtttttttttttttttgtatctcaatttccttcagtttagctctgattttggtcattttagctctgattttggtcatttcttgtcttctgctagctttgggattggtttgctcttgcttctctagttcttctagttgtgatattgggttattaatttcagatctttctttttgatttgggcagttagtgctataaatttccatcttaacacttctttagctgtgccccagagattctggtatgttgtatctttcttctcagtttccaagaatttcttgattttggtgttaatttcattatttactcagaagtcattctgaaccaggtcatttaattttgatataattgtatggtttggggagattttcttagtcttgatttctatttttattgcactgtggtctgagagtgcagttggtatgattttgtttgcttgtttttttaatttgctgagggttattttatgtctgattatgttactgattttagagtatgtgccatgtggtgaggagaagaatgtataatctgttggttttgggtggaaagttctgtagatgtcatatccatttggtcaggtgttggtggaaggctaaggaggagcaaaggcaaatgttacatggcggcaggcaagagagcatgtacagggaaactgccctttataaagccatcagatttcatgagacttattcactatcacgagaacagcatgggaaaaccgcctccatgattcaattacctcccactggatcactcccatgacatgtggggattatgggagctgcaattcaaaatgagatttgggtgagtaagtctcatgagatccgatggctttataaagggcagttcccctgcacacgctctcttgcctgccgccatgtaacatttgcttttgctcctcctttgccttccaccatgattgtgaggcctccccagccatgctgaactgtgagtcaattaaacctctttttcttcgtatcaccatgggtgccagctcccagttaataacgctttttttttgtttgtttttaaatagagatgggggtttcaccacattgcccaggccggtcttgagctcctgagctcaagcaatccacccacctcagcctcccaaagtggtgggattgcaggcatgagccacggtgcctggcctcataatgcttttatatctggtattcttcataaaaatatgaagatgaatgttttcaaattcaaagtctaatgtctcagcctttgattgaagcatttaattcaataacatttataggcttgatggaaggagcatttccacgctgtgtttaggagacaggagggcaaattgaactcccagagttaaatccattagtgcccctgactcatccccaggttctgatccaccctagggctccatttcaggaattatcgtctggcctccaagctttggaatatgtttggcctcctgaaagtggttgacttgtgaactgtgtgtggatgcagcaggctgcttatctgagctagttcaagtttttgctttataaaatattgccgccatataattccagtttttccacacatttaacaattttatttatttcttttttcttttttctttttttttttttttgagacggagtctccctctgtctcgcccactctctcactgcagcctctgccttccaggttcaagtgattcctctgtctcagcctcctgagtagctgggactacaggcgtgcgccaccacatccggctaatctttgtattttagagacgggatttcaccatgttggccagactggtctcgaatttctgacctcaggtgatccacctgcctcagcctcccaaagtgctgggattacaggtgtgagccaccacgcccggctttgttggggtgtttttatattctgcactgaaaattagtagattgagacataaggtgggagaaaggcttggcctgtgcagccaacagcctcatccaaaactcctgattcctggaggacatcagcccctcccttctgctgcagtgtggcctgggctcccttcctgctctcaaatcaggggatagctccactggacagtgagtctggaatttcctgcacagacttgtgggtccctgtccaagaggaaaaaggaggaaggtcaggacatactgcctaaatgcaaatgtcccctgggagggggtcaggtcacagcgcagggaggaagctagtcctctcaaggcctgtctggaatctgtttatcaggttccactccgctgcccgagatcgcttcttccgttactcagtgcccgggggagggacctggcgcactatccaatcagggccgcggggcggggtcgtgagaactgtcaatcaggcgcactgaccggaggagggtgcaaggttcaaagagcccgccgagtcttctccacgcccctgcactgggctccgggttctgtcactgagagacgccctggaacgtctgtggcagcttctgtctcgctgggacccgcactgacagcgggaggcagagggaggaacctggacgccggaagccgggaaatggtgagtgtgtgaggtctggtgtcccgacgcgtgagaggagagactggttggaaccggccggaaccggctgtggtggcaccaggtcttccccgccggcgacaccctggcgcagctcggccctcggttccctcggccgcacgatggggctggggcggcagccgggaccccgggcgtcctgtcccgtccctgcgcggccactgcggccctggccctggaggcctgtctgggcagctccgcgcccgcagtcctgcgtctccccagattgtgcggctgtaaccggcacaggttcgcggcccgagtcactgcaccgagacgccgagggctgcagcagaaacagtttaatagggggagaggggaggacaccccagatccgccttcctgagaggtttggggatggggtgtttaggggtgtggacaggggcggctggggcgtggggtcgctggatggtggggaagtgaggggtgactcttgggactggaggtgaagaaaccgcattcttctgctgagtgggttcccttgtggggtcttcagcctggttggcgccagcctttccgctggaattcaggatctgagaaagaactcaggcgactcttgagcaactctcagagatctcatccccaagcacaatggcgaagccggcggtcagcatctgctgtggcctgactcttggggaggcggccccgcgaggcagcggggctgagggcacctggttaatatctaactgcaatctcgcctccagcctggctcgcagttctgtgaacccggtgaggaggctgcacggtgatgacaggtcaccaggcagactcgtgtgtggggtttgtgtgtgggaggagttgtggtctgtgtggtcccctgtcccttctttcttcccaagggtgacccgttcgccttcgagtcttccaaagatgtgggcagcagggtctcaagtccaccactgtgttctctcatcctaactcctcctagggccgacagaaaatcccttggcttccagagccttcctcaggctttctctcctcaattcacagcaactttatgaactccttgtcccccagtttatttttcaaacagaggctagtattttaattgtcattttgtttatacatagcaatatatggctctttgtaaaaggttttgtgtttgtgaacatttcacatgagaggaagcagagaaaaaccaccagacatttcgctgtaaaaaaaatgaatattaataaataaaatctttgttactgtcctcccttcatcatccctagacagagacaccttttgagaatgtctttggattaagtttcctctttggaaacgttacagagtgatgagtccccagcccatcctctatggtttcctggtcctgggtttcagagctgcctggggccaccccaagatgcccacagctgccaagtctcttgtagtgtcaagtgaatatcagtccctttgtcactcctcccagaggacaccctgaggtggagatggtgggaccttgtagggaagcagcatgatgccctgtagtgggaggagtctcctggtatacccttcctcaataagctacttccttagaacactcagcttttcttcccccatcccttccttggggatatatggctggtcagccaattggatggtggtattaaggggacaggactgaaatgattcttcccttctgatgttctcagactaatgaagggagaaaactatccctaaggacaggaaaaccaactccactgaggtggtgcaagaacctgaaaagctaacaatgtagtgtctcctgggatcatggttattgagcacttcggtgagcagcatggtgatgggggatgttccaggtgataggaggacctgacttgacacactctgcacccatagggaggtggtgaaaggagatgatggtataagggatgcatatggatcaaccaaattgaagaactgggagaagatagagaactagaaactgtgtcaagggtcataaaaccccttttttggtatggaaaaacgaaaccacactcaaaatggaagctgaggtaacaaactgagtaaaaattaatgaaaactggaaagtctatagttagttgatcattgtatatggagatgctgggcagaagatggattattctcctgtaggtaaccatttgtctccatcatttctgttgaagtgtccctcatttgtatcactgcctggcaatacctgctgtgtcataggttcttgtaccttaagtagatgctcttgttccagaatttgccatttttcattggtttatgtatccatcagtctgctaatatcatactctcctgattactatagtcttcaaagccttgatgtgtggtagagaaagacccttcctaacttagtcctttgggttgctataacaaatttaccatagactgcatgccttacacaacagatattcatttctcaaagctataaaggctgagaattcagtttcaagcagcaggtcagttgtctactaaaggactctttttttttttattttttatttttgagatggagtcttgctctgttgcccaggctggagaacagtggcatgatctcagctcactgcaacctccgcctcctgggttcaagtgattctcctgcctcagcttcccaagtagctgggactacaggcacatgccaccaccccagctaattttttgtatttttagtagagacggtgtttcaccatgttagccaagatggtctcgatctcctgacctcatgatctgcccacctcggcctcccaaagtgctgggattacaggtgtgagccaccgtgcccagcctgggcctctttcttgatttgcagatggcattcttcctgttatgccctcacatggtggagatatgtctgtaatgtctgtctagttttggtgttaaggcagttgtattagtccattttcacactgctataaagaactaccagaaaagaggtttaattgactcacagttcctcatggctggggaggcctcaggaaacttacaattgtggcggaaggggaagcaggcacttcttacatggtggcaggcaagacagcatgtgaaagaggaactgtcaaacacttataaaaccgtcagatttcatgagaacccactatcacaagaacagcgtgggggaaaccgcccccatgatccagtcacctcccacaggtccttcccttgatacatggggattatggggattacagttgaagattagatttgggtggtgacaaagagccaaaccatattatcagtgttggccttacaacatgaattagaaagtgttccctctgcttgtattttctgaaagagattatagagaattggtgtcatttcttccataagtgttttccagaattcaacagtgaaaccatgctggcctgttcctttttcttgggactttttgtttgtttgtttgcttgaagtggagttttgctttgttgtccaggctaaagtgcagtatcatgatctcactgcaacttctgctccctgggatcaagtgatcctcccacctcagcctcctgagtggctggaactcccactacagcctcctgagtggctggatgtgccaccccatcctgctaattttttgtgttttctgtagagatggggtttcaccatgttgccgaggctggtcttgaactcctgggctcaagcagtctgctgatcttggcctcccaaagtgctgggattacatgtgtgagccaccacgcctagcctaccactgcactatagcctgggtgacagaacaaaactctgtttcaaaaaaaaaaaaaaaaattgaatgcaatctctagaaagcaaagatatataaccaatgcttaaaaaccttccactttaggaaactaaagaaagaatagcaggatacatgtaaatcgagcagaggaaaataacaatgagagaaggtattaatgaaatagtaagcaagaaatcagtagaaaacattaacaaaccaaaagctggttccttcaaaagatcaataaaatgaataagcccataggcaagctaactcagaagaaaggggggttatgattactcatcttgtgtacattaaaggacctcaaaggagtattaggaacaactgcatgcccacatagttgataaattacatggaatggaccaattccttgaatgacacaagctaccaaaactcacaaaaggagaactaattaatatgaaaaggcttataactattgaagaaattcaatcaataaataataaaagtcccaggctgtgggcagcaagccacccaggcgccgaggcaagagaccgaggacacgagctgttccagtataataaaatataaaacaagaatagttataccagatatagatcttagatatgattatatatgaatatcattaatcattagttggcagtaattactctttattccaatattataataatcctcactctataatcataacctacgaaaaaccaggccatacagagataggagctgaggggacatagtgaggtgtgaccagaagacaagtgtgagccttctgttatgcctggacagggccaccagggggctccttggtctagcagtgacgccagcgtctgggaagacgcccgttgccaggcggtccgtggtctagcggtagcaaaaagtgtcaaggaacacccactacttagcagaccgggaaagggagtctccttttccccgggggagtttagagaagactgctcctccacctcttgtggagggcctgacatcagtcaggtttgtccgcagttacctggaggcgtaaccatctccctgtcatgctgtgcttcagtggtcacactcctagtctgccttcatgttccatcctgtacacctggctctgccttctagatagcggtagtaaattagtgaaagtactaaaagtctctgatatgcagaaataatggcgtaagctgtctttctctctgtctcctctccctctctgccttggctgccaggcagggaagggcccccgtccagtggacatgtgacccacgtgaccttacctatcattggagatgactcacactctaccctgccccttttgcttttgtatccaataaataacagtgcaaccagacatttggggccactactggtctccgcacattggtggtagtggtccccgggcccagctgtcatttcttttatctctttgtcttgtgtctttatttctacgctctctcgtcaccgcacatggggagaaactcaccgaccctgtggggctggtccctacaccaggccaggctgggtgcactggtaggctaggcatggtggctcacatgtgtaatcccagcacttttagctgctagcattcaggaaatctatcagaatactggatgaacacaagctaagggaacagagacttcagtgactacactggacagagaatacagtctctgcaaacatactctgaaaatgttactaaacaaatgaataattaaaaccttccacaatcccagcactttgggagaccaagattggcagactgcttgaacccaggagttcaagaccagcctgggcaacatggtgaaaccccatctctacagaaaacacaaaaaattagcaggatggggtggcacatccagccactcaggaggctgtagtgggagttccagccactcaggaagctgaggtgggaggatcacttgatcccaggaagtagaagttgcagtgagataataacactgcacttcagcctggacaacaaagcaaaactcctcctgggttcacaccattctcctgcctagctcccgagtagctggaactacaggcgcctgccaccacgcccgactaattttttgtatttttagtagagacagggtttcaccttgttaacgaggatagtctcaatctcctgacctcgtgattcgcccgcctcggcctcccaaagtgctgggattacaggtgtgagccactgcgcccggcctgctttcaattctttacatttccttctaagcacattctaaaaattttgctatgatatactctttttttatcaacattgcaatatttacatttgcttgagaattctctttgacgcttttatagttgagaggcttgtcacttaaatctccaggtttttaggcttttcaagtatgtttctgttatttattgctactttaattataatatagtttgatcgcatattttatagaatttctatttttaaaaatgtgttcaagtgtgttttatgattcagaatatggtctatcttggtatatacttcatgagggcttgaaaataatgtgtagcctgctggtgtaaaatgaaagaatctgtaaatacacatcaattaaatctagttgattaatagtattcttgagttcacatgtatcattagtgattttctgccaaactgatctgtcaattattgaaagaggtgagttgtttttctccaactatagttgtagatttgtgtattttgtcatgtggttttataagtttttgccttatgtattttcatgatctgtgtttatgggcataaatgttaaggattattatgtcttgtaggattgatctctttatcattatgaaatatctccatcgtgtgtaatttttttgacctaaaatcttatttgtctgaatttagtatcagtgttccatatttcttttgattagggctagaattgcatatatttatccaaacctttctatttaaaatggttttcttgtgcacatcgatgggccttctttttcattatactctgccagtccctgccttttttactgttgaatataggtaatacacattctatgtcataactgatgtaattggattaatatcacatatatgttattgttttccatttattgtacattatctgtttttttccactttctcctttctgccttctttcattttgactgagcatgtatatgattccatttgcttgcttctatgagtatagtaaatctctttgtttcttaaatgttattagtgaattcactagagttggtagaatactattcacaactaatgagcctacagtttcaaataacactataccggcttcaggggtagtgctgatataacaaagtattctgaattcctctattgtattgcccaatacattgctgatattattatgttgaacaaacctgtatctattatattagatcagataggtataagaaaactaaagaatttcaaatgtcttcatttaattctaagagtcttcgtgtgtgggtgtgtgatccaaatttctaatctatttaatttttcttctctccgatgaacttcttttaacattactagcaagacagttgtatcaatcatacattctatcaatttcattccttttttttctccttagtctaaataacttcaattgttctatcttcattttagctgattttttactttggttgctcacatctgttgaacatctatagagaaattttcattttagatgttgtgctttgcagttgcataaattaaatatggtccaatttctaattttgtattgatatgattttattcatacatcccttttctggttttcttttagttctttgttcataattgcctttacctcattgaacatatttaagacagttgctttaaagtttttattcaataagtctaatgtctgaggttctcagagatggtttatctaaattaaattttttttccattgatgagctatatttttattcttctttatagtctttatggattttttgtgttgtaaagcagacatttgaatgttataatctggaaatcagattcccttcactgtttgcccttctggtttgtggaaggttttaattattcatttgtttagtaacattttcagagcatgtctgcagagactgtgttctctgtccagtgtagtcactgaagtctctgttcccttagcttgtgttcatccagtattctgatagatttcctgaatgctagcagctaaaagtaaaaaagacatgccaaacaaaaagctgacctcttccagtctttgtggatgggtctgtgatgtagtatttggtgaacacttagccagactgcttaaaactctgctttagccttacctttctgttttaccaaactgagagatgatgcagagctgaaaatgagggcctccccaggtcttttgtgaaaatgtgttttttccagtgcatgcatttccagtacatgcattctcaattccccaaaacactggagtgcttttgaatgcccccttttttttgagatggagtctcgcgctgtcgcccaggctggggtgcagtggggcaatctcagctcactgcaagctccgcctcctgagttaatgccattctcctgcctcagcctcccgagtacctgggactacaggtgcccaccaccacgcccggctaattttttgtatttttagtagagacggggtttcaccgtgttagctaggatggtctcgatctcctgacctcgtgatccgcccacctcggcctcccaaagtgctgggattacaggcatgagccaccgcgcccagcctttttttttttttttttgtgacggaatcttgctttatcgcccaggctggagtgcagtggctcaatctcggctcactgcaacctccgattcgcaggttcaagcgattcttgtccctaagcctctcgagtagctggaactacaggtgcccgccaccacacctgactaatttttgtattcttagtagagacggggtttcgacatgttgaccaggctggtctcaaactccagacctcaggtgatccacctgcctcagcctcccaaagtgctgggattacaaacgtgagccaccacgctcagcctgaatgccctaatttctgagggaaattgttctctccttttttattcccaggacttagatgttctaccatatgtcttaatcataatttgttgtcccagttgtttgaaggttttttatgtattttgcaacaatttgaagcagttcctgccaagcttgacctaattaggctccatcattgattaaataaaaaagagaactttctttcagacctttggatagtccacagatggattgaaaaatacaaaggtgcaataacttacaaataagatctgatctgctctctctagggatccacattggaaatttggtctgctgttttcaagactggtgctgatgtgaggagggattgggacaaggacaaataaaaactccacaaaactttcctactatttgtcaccttccttattctatttgtttatctctgtgttaatagtacagggtactgaatataatatattcaccatactttatctgtttttggaaagctgttgctttcttggttagaaggattttagcatttttagatgtttgtgacttctattagatttggtcatgtaatttttaatgatgacaaaaaggtctgtttagggatttagggaaatattatagatattcatgagagatgacattgagtttttttctaagaacatatgcaatcttggcccttcttttcttctttgacattacttaataaagtttaatttttccattgggatggtaaaatatccttattagtcttttgtcatacttaactacatatgttctacagtaaaccagttgctagcttccaaatgttctctcttagtgtagtcacatagcacaggctaaatcccccaaggcacaagggtcactcattacagacacagtgaccagagtgttttttccctttttttttttttgaggcggagtttctctcttgttgcccaggctggagtgcaatggcgcaatctcggctcaccgcaaccttcgcctcccgggttcaagcaattctcctgccgcagcctcctgagtagctgggattacaagcatgaaccaccataccgggctaattttttgtatttttagtagagacagtgtttctccctgttggtcaggctggtctcgaactcctgacctcaggtgatctgcctgccgcggccttccaaagtgctgggattacaggtgtgtgccactgtgcctggcctcagagtgtttttttcatggcttagtctgttttttgttgcttataacagaatactttaacctgggtaatttataagaaatgatatttattttttacacttctggagggtgggaagcccagcatcaaggctgggcatctggtgagagccttcttgctggtaactctcttttgcacaataggtagtaggactttgtcatgacaagaactgcagacccactgtagaaatagaaatgaggagtgattcaggcaataagactcactttcttaacttaccaacaagaggcgtgttcctattcaactgttactttacaaaacatgttcatttctaggatcagaattgtgtgggataaaatgagtgtaaagagagaataagagtgggtttaccatgttcttgaataaatgcttggaaaccacagcatcatgtgaaggttatgaagtgaatttacattcccagtgccttcagttttaatattcctcctctgcacatgtgaaatatttcaggactcagtggcatttgaggatgtggctataaacttcacctgtgaggagtgggctttgctgggtccatcacagaagagtctctacagagatgtgatgcaggaaaccatcagaaacctggactgtataggtaaggatgtcatcatgtcttcacttagtcaattagagacatttgtttcttggtcatcaatgctgttcaattatttgaaatatggaagggtatataattggcccttgaaccagccacccaagcagtcatacatcttctcccgcacaacttaaccactagtagcctactgtttactggcagcattactggtaacataaacagttgattaatacatgtattatatgtcatatgtattacatgctatatattctcacaggaaagtaagctagaaaaggaaaatattcattaggaaaccataggtaagtggaacattatttagtattcatagaaaatacaacattacaaagttttcattctgattgtctttacattgagtagactgaataagaggaggggttggtcttgctgtctcaagagtagcagagactgaagaaattcatatgtaagtagacctgtgcagttcaaacctgtgttgaagactcagctgtagtttggtgtgtgaatcatgcatgattgtagtgtacataaaatcttacagtctttctataattttataataatttatagtcatttttctggttctaacttttaggaatgatatggcaaaatcatgatatagaagaagatcagtacaaagatctcagaagaaatctaaggtaatttgcactcacaagagaaagctgtgtccttgaagtgattcatagtatgccagaaattttattttattttgtttgttttagagacagtgtctcactttgttgctcaggctggagtacagtggtatgatcatagctcgctgtagcctcggactcctgtgctcaatggtcctcccatttcaacctcctgagtagctagggttacaggcatgcaccaccacatgtggctacatatttagtttttgtagagatagagtcttgctgtgtttgaccagactcatctccagctcctgtccttaagcgttcctcctgccttggcctctcaaaaggcaggtattgcaggcatgagccactgtgaccagcccaaaattttaaaaagaagcaaggaaaattaacaagcccaccttaaatttatttattcttagaaaattttcttcaaaaacatatacttaaatgtgacatggctatggctattcagtgcctgcaaaatagttcccttggaaacagtattaagaattcccatatgaatgtcactatcttcaaaacagctggggttgagttaccttgtacatcattctgtccattcatgttcaaagagggcatgagacctacactttgcatgataatgttagaaatgtaaatccaggccaggtgcgatagctcacacctgtaatcccaactatttgggaagctgaggcaggaagactgcttgagcccaggtgttcaatcagcctgggcaacgtggcaagacgccctttctacaaaaaatacaaaaattagctaggcatggtggcctgtgcttgtggtttcagttacttgggaggctgagacaggaaggttgcttgagcccaggaggtcaaagccgcagtaagccctgttcacattactatactccagcctgggcaacagagcaaaacccagtttcaaaaaaaaaaaaaaaaaaagaaaaagaaaaagaaaggctgggtatggtggctcacccttgtaatcccagcactacaagaggtcaaggtgggcagattgcttgagctcaggagttcaagactagcctgggcaacatggtgaaacctcgtctctataaaaaatacaaaaatctaatctcagcattttgggaggctgaggtgggcagatcacgaggtcaggagatcgagaccatcctggctaacatggtgaaaccccgtctctactaaaaatacaaaaaattagccaggtgtggtggcaggcgcctgtggtcccagctacttgggaggctgaggcaggagaatggtgtgaacccgggggaggtagagcttgcagtgagccgagattgcgccactgcactccagcctgggcaacagagcgagactccgtctcaaaaaaaaaaaaaaatcagccatgtgtggtggcttatgcctgtagacccagctatttgagaggctggggtgggaggatggtttgagtccgggaggtggaggttgcagtgagctgagatcacaccactacactccagcctgggcaacagagcgagaacctgtctcagaaaaaaaaaagaaaagaaagaaagaaaagaaatgtaaatccaatacttattaatacaaaatcatttataaacaaacctttactaatgtacttcttattttttacagatgtcatatggtagagagagcctgtgaaattaaagataatagtcaatgtggaggaccctttacccagactcaagacagtattgtgaacgagaaaatacctggagtagatccatgggaaagcagtgagtgtacagacgtcctcatgggtcgttcatctcttaattgctacgttagagttgacagtgaacacaaaccatgtgagtatcaagaatatggagagaagccatatacacatacacaatgtgggacagctttcagttatcagccctgctttcaaatacatgaaagacctcagcatggaaagaaactctatgattgtaaggaatgtgcaagcttcagttctcttgaaaaccttcaaagacacatggcagcacaccatggagatggacctcgtatatgtaagttgtgtggaaacgcctttatttggcctagtttatttcatatgcttagaagaactcacactgaagagaaaccatatgaatatgagcagtgttctacagcgtttcctgcttatagttccactctaagacatgaaagaacacacagtggagagaaaccctatcaatgtaaacaatgtgggaaagccttcagttgttcctgttacactcaactatatgaaaggactcacactggagaacaatcctatgaatgtaagcaatgtgggaaagcattttatcatcttggaagctttcaaagacacatgatagtgcacactggagatgggcctcataaatgtaagatatgtggaaaaggctttctttctcccagttcagttcgaagacataaaagaactcacactggagagaaaccgtatgaatgtaagtattgtgggaaagcattctctgattgcacaggttttcgaagacacatgataacgcacactggagatggacctcataaatgcaaggtatgtgggaaagcctttgattctcccagtttatgtcgaaggcatgaaacaactcatactggggagaaaccctataaatgtgaatgtgggaaagcctttagtgatttctattactttcgaaatcatgaaactactcacactggagagaagccatataaatgtaaacaatgtggaaaagccttcatttgttgcacttaccttcaaatacatgaaagaattcacactggggagagaccctataaatgtaaacaatgcggaaaagccttcaggtcttccaattacattcgagtacatgaaaagactcacactggagaaaagccctatgaatgtaagcagtgtggaaaagcactttctcatctgaaaagctttcagagacacatgataatgcacactggagatggacctcataaatgtaagatatgtgggaaaagctttgattctcccagttcatttcgaagacatgaaagaattcacactggggagagaccctataagtgtaaactatgtgggaaaggcttcaggtcttccagttacattcaactacatgaaaggactcacactggagagaaaccctatggttgtcagcaatgtgggaaagcattatctgatctctcaagctttcgaagacacatgataacacatactggaaatggacctcataaatgtaagatatgtgggaaaggctttgattatcccagttcagtgcaaagacatgaaagaactcacactggagagaaaccctatgaatgcaaggaatgtggtaaagccttcagtcattcaagttacttacgaatacacgaaagagttcatactggagagaagccgtataaatgtaaggaatgtgggaaaccattccattgtcccagtgcctttcataaacatgaaaggacccacagtatggagaaaccctataagtgtaaagaatgtggggaagcatttcattgtatcagttcctttcataaacatgaaatgactcactagagaaaacccctatgagtgttgaacatgtgagaaagccttaagtactttcagcttcttacaaatacataagagactcacactgaaaaaagttgtatgaatataaaaatgtactaaaaccttccatttttttcagtaccttttgaaaacatgaccaaactcatacttcaaaaatatatatataatgaatgtgaggaatatgaaaaaactttctttgtctagcaaactttcaaaggtggttattataacatactagcaatggaccttactactgtaaggaatgtagaaatgcatttactagtcctaattcatttcagttacatgaaagatttcaaactgcagagaaccactatgaatgtaaacaatgtggtaaagcatttagtagcttcagtttcttttgaatacagtcttctctagtttctgaggtgaattgattccagcaccctcaggaatacctatattcagagatattcaagtccctgatattaaaaacagcatatttgcatataatctaggcacatttttctgtatatcttaaatcatttctagattacttataatacacaatgcattgtaaattctgtataagttgcttttgtattatttagggaatcatgacaagaaaaaagtctacatgttcagtacaaatacaactgtcattcattgtcctaagtacgtgtacatgtcagcaacaatgtcaggatctgtggagtttgcgagtataagatctttaagtgttgaaggtttcatctccataattgcagctgctttagctacaaatattataggaagctgttccttctttttctttacatcaccaaaccttccagtggttataggcattttgttatccttcaagtgacctggagcctttgttgcatgacaggattgtacctgaagatcacattctttaacaattggacctactgaatctgtaaaactactagaagaaaacatattgaaaatacttcaggacattggtttaggcaaagattttatggctaatacctcaaagcacagacaacaaagataaaaatagacaaatgagactatcttacactaaaaagtagctgtgcaaagtaaagggaacaacaagagtgcagagaaaacctgttgaatatgagagaatatttgcaaactatgcgacaagggactaatatccaaatatacaaggaactcaaacatctcaacagcaaaaaatataaataatcccattaaagtgggaaaaggatgtgaacagacagttctcaaaagaagacatgcaaatggccaaaaagtatatggaaatatgttcaacatcactaatgattaggaaaatgcaaattgaaaccacaatgagatactctacttagaattgttcttactaaaaaagataaaaaacaacaaatgctgatgaggatgtggagaaaagaaaactttcactgttggtgaaagtataaattagaacaactactgtggaaaacagtatgtagatttctcaaaaacctaaaaatagaaccaccacatgatccagcaaaccaagtataaccacaggaaaagaaatcagtatatcaaagagatacttgcacttgcatatttatcacagcactattcatgataacaaagatatggaattaacctaagcatccatcagtggacacagggataaagaaaatgtttatgtacacagtggaatactatttggccataaaaaagagtaaaatgttattgctaacaacatggatggaacttgaggtcattatggtaagtgaaataagccaggcacagaaagacaaataccacatgttctcacttatatgtgggaggtgaaaaacttcacctcatggagatagggaatagaataagttatccggggctgagaaggggaaatgaagagaaattggtgaatatgtacaaatttccatttagatcaaaggaataagttctgatgttagaaagcatactagagtgaactatagttagcaaaaatatattgcatatttcaaagtagttggaagagaggacttgaaatgttaccaacacatagaagtggtaaatactcaagatcatggataccccaaatacgctgacttgaccattacacattctatgcatgcaagaaatgctcatgtgtaccttatatatatgtaaaatatgtatcaataaaagaaaatatataagatagttttaaaataacactattgtcaggtgtctgtgggctgaggaacagcctaaggtgtaaacttaagttcttctcaggtcttttcttagttgcacctgtccctgggcatgtgtggtaactgtctaattttctctgcatgtatggttatttttgcacaacctaatcttcagtggctctcaaaaggagaggaataaaagcattaagggaaaaataaaaggcaccagcctggaagtcacttcagatggaggggaagggccttcaaaaaatggagagagatgcagcagcaacagtcaccaccacttctttgtctgtaactctgtgatcagaagcaacaattatcaagcagtgcgcagatccccaatatttggaagacaggtcctttttgtccaccctggccccccaaaactgcatgcagactgctgttagaacttatgcatagctacctgtcatggagctgaggagggggaatgagtcagggctgctgactcaactaagagttgaaattgaccgaaattaacccaattttattagccaattatttccctggaagctgcaagcttttaatagtatccgcagtttcaaaatagctacatgagttggattctgccaatgcaaatccaggtgggggatacagattcttcatgctttttattctgccatcttccttgaatcctctgacctgactttttatactaatacattacttcaggtcccatcccacatgtcacctcctcagcaagtctttctgtcacctcagttactcctttccatatatacattttttttaatacacttttcagagtcagggaaatccgattaggttcacagactttactgctttcttaacaacctatgaaaagtcaaatcatataaatgaaccaaactgaatagtgtcactgttacttttatgaagtgttatcccgtagatttaaaaaaaaagaaagaaagccgggcgcggtggctcacgcctgtaatcccagcactttgggaggacgaggagggtggatcacctgaggtcagaagttcaagaccagcctggtcaacatggtgaaatcccgtctctactaaatatacaaaaattagccgggcgtggtggcaggcgcctgtaatcccagctactcgggaggctgaggcaggagaatcgcttgaacccgggaggcagcggttgcagtgagccgagatcgcaccattgcgctccagcctgggcaacaagagcgaaacttcgtctcaaaagaaaaaaaaaactgctttgcaccgatttgcagaaaaagagacaacgaactccctctcgtggtgaggatggcattaacatccacacataactcctttagggtgtggatttctgaattgtgctgagatctccagaatttacagcaagtgatggtcagtttaaaatattctgtgccttcaatgaagaagtagtgtagcaggttagggagaagagaagcaaataaaatggatgaggtcctcacttagtatatcacaatctctcctggaagactatttatttatttatttttttgagacggagtctcgctttgtcacccaggctggagtgcagtggcgtgatctcgggtcactgcaagctccgcctcccgggttcacaccattctcctgcctcagcctcccgagtagctgggactacaggcgcccgccaccacgcccagctaattttttgtatttttagtagagacggggtttcaccgtgttagccaggatggtctcgatctcctgacctcgtgatccacccgcctcggcctcccaaagtgcttggattacaggcatgagccaccgcgcccggctctggaagacaatttcaaatgaataaatcaaggaacatgagagagccacaagggagttcaacctgagtccagttagactccttgaaagggaaagctatttacagaatacttcggatttagctgcggaaatgatttgatgggtcagtggtggtggagtgaggttgagaccatttaaaataggtgacgtaaacatgtgaaacctcagacacagagcccttggtgttaaccatgatctgttgaaagtcagaagaatgaagcagagggaattgttggaagctcacatttgattagcttttttacatataacatgtgttgacaaggccgggagcggtggctcacgcctgtaatcccagcactttgggaggacgaggagggtggatcacctgaggtcaggagatcgagaccatcctggctaacacggcgagacctcgtctctactaaaaatacaaaaaattagctgggcgtgttggcgggcgcctgtagtcccagctactcgggaggctgaggcaggagaatggtatgaacccaggaggtggagcctgcagtgagccgagatggcgccactgcactccagcctggacaacagtgcgagactccatctcgacaacaacaacaacaaaaaacaatgtgttgacgtagaaattatttattgatgtatttttctcaaactaataattattttgaagggttttttttccaccatgtaaacataaccaactcccaggagcttccatgtgtatatgcttaaatgtataatatgtgtaaaagttctatcagacttaaatcatccatttatcacactttaaacacctatgaatgaccagcctgggcaacataccaagacctaatttctaccaaaaaaattttctttctaatgatccaggcatagtgacatgtacctgtagtcctagctactccagaggatgaggtgggaggattgcttgagcctaggaggttgaggctgcaatgatccgtgatggcatcactgcactccagcctgggtgacacagtgagaccctgtctcaaatagaagaaaatgtcaaataagatgaatgtgattgcttaaactcttccacacagaagaatttatcaagatggtcttcagaggtatatcatgaggaagcagtacagtgcaatgaggaaaaaacaacaaaaaacaagtgaagggggcagaagacctcaattctactctttactctctctagatgtgaaacaaccttgggcaagtcactgcgcctctttgagcctgttatttcatctgtaagaagctgagataattaatatatcatagataatgtagtgttctcagtagaaactgaaacagcactctgagatcaaactcattaatattcctacaacaaaatgagtaaatacttgaaacagaacaaaacagccaataaatagcctcttatttcttgatgtcaggttcatgcctaccttacaaaatagagttgtcagagctttttggttcgtagaactgaagaaaagggactgtagactcatggaagtgtctaatgtcagaaagccagatatgtcaaagatgaatttctgaaattaaaacattttatttgggaagaaatacttgtaattcagggcatacacacagaccaagtggtctttggtatgtcttaaaaacagagaacattggaggtttcatgaaaaggagaagtgttacatatggttcttcaagaaagttcattggcactagtaaggtttttgggagttggaaagttctgatcgggaaatgatggcaatgagtaaaactattcttagagccacagcaagttgtttcagtaactattagataaaaccggtttcaggatacaactggctgtttcagcagcttggcagagaatgacatgcttggagcattggtacgtgccctgagtgcttttcccccttggcctgttgactcttatagttgagtttggcaagaatgacccaatttatgtgatcaacattcagtttgctaattcacaacaaaacaattttctgccactccatgactaatgtttttaaatagccctcagcctttggcttgaacttaccaaaggacttttcaaactaaaccatgtccactcttttttttttttttttttttttgagacagtctcgctctgtcgcccaggctggagtgcagttgtgcaatcatgattcactgaagccttgacctcctaggctcaggtgatcctcctgcctcagcctcctgagtagctgagaccacaggtgcatgccaccatgcccaactaatttctatagagacaaagttttgcagtgttgcccaggctggtctcagactgctgggctcaagcaatccacctacctcagcctctcaaagtgctaggattacaggcatgagccaaacatttaaagaactaataccaatcctactcaaattattctgaaaaatagaggaggaggccaggtgcgctggctcacacctgtaatcccagccctttgggaggccgaggcaggcagatcacgaggacacgagttcgagaccagcctgaccaacatggtgaaaccccgtctctactaaaaatacaaaaattagccaggtgcggtggcacgtgcctgtaatcccagctactcaggaggctgaggcaggagaatcgcttgaacctgagaggcagtggttgcagtgagctgagatcacaccactgcactccagcctgggagaaagagcaatactccacctcaagaaaaaaaaaatagaggaggaaggaatactttcaaactcattctgagtccagtattacccagataccaaaaccaggcaaagacacattaagaaaactataggtcaatatccctgatgaatattcatgcaaacatcctcaacaaaatactagcaaccgaattcaacaacacatcaaaaagataatttatcatgaccaagtgggatttatcccagggatgcaaggatagtatgtgatacatcatattgacagaatgaaggacaaaaactatatgatcattttaataatgctgaaaatgcatttgatgaaatttgacatccctttatgataaaaaaaaccttcaaaaaaaccgagtataaaaagaatatacctcaacataataaaaagtcatatatgacagacccacaactagtatactgaatggagaaaaacagcctttcctctaaaatctggaacaggacaaagatgcccactgtcaccactgttattcaacttggtacttgaagtcctagttagagcaatcagataagagaaagaaataaagggcatccaaactggaaaggaagaagtcaaattatccttctttgcagatcacatgatcttatatttggggaaaacctaaagacttcacaaaaaaactactagaaccaataaattcagtaaagttgcaggatacgaaatcaacatataaaaatcagtagcatttctttcagaacaaggatcactgggagaaaaaaaataaaaattaaaaagccaaaaatgaatagcatttctatatgctaacagtaaacaatctgaaaaagaaatcaagaaagtcctctttacaatagctacaaataaaatacctaggaattaatttaacctaagaaataagtgaaagatctctacaatgaaaaccataaaccattgatgcaagaaattgaaaaggacaaaaaatggaaagatattccatgttcatggattggaagaataaatattgttaaaatgtgcctactacccaaagcaacctacagattaaatacaattcctatcaaaataccaaggacattcttcacagaaatagaaaaaataatcctgaaatttatatggaaccacaaaagacctggaatagccaaagctatcctgatcaaaaagaacaaaactggagaatcacattacttgacctcagattatactacagagctatagtaaccagaacagcatggtcctggcataaaaacagatacatagaccactggaacagaatagagaacctagaaataaatctatacatttacagtgaactcatttttgacaaaagtgccaagaatgtacattggggaaaggacagtctctttagtaaatggtgctgggaaaactgaatgttcatatgcaggaaaaagaacctagacccctatctctcatcatatacaaaaatcaaatcaaaatgattaaaggtttaaacccaagacctcaagcatgaaactactgaaataaaacattgaggaacgtctccaggacattggagtaggcaaagatttcttaggtaataccccacaagcataggcaatgaaagcaaaaatgaacaaatgggatcacatcaagttaaaaaagaaacaacatagtaaaggaaactgtcaacaaagagacaacccatagaataggagaaaacacttgcaaactatctatctgacaatagattaatatccaggatatataaggagttcaaataactctatagaaaaaaatgtaataatctgattttaaaatgggcaaaagatctgcatagacatttcttaaaataagacatacaaatggcaaacagacatataaaaaagtgctcaacgtcactgatcatcagagaaatgcaaatcaaaactacaatgagatatcatcttacctcaattaaaatagcttttacccaaaagacaggcaataacaaatgctgtgaggatgtagagaaaaaggaacccttgtacactgttagtgggaatgtaaattagtacaaccactatggacaacagtttggaagattctcataaaactgaaaatagagctaccatacaattcagcaatcccacagctgggtgggattggaaatcaatatatcaaagagaaggaaaggaaatcagtatatcaaagagatattttcactcccatatttatttattacaatagcaaacatatggaatcaacctaagtgtccatcgatgatgattggataaagaaaatgtgttatatatacacaatagaatactattcagctataaaaataatgaaattatgtcatttgcaacaacatggatgtaactgaaggtcattatgttaagtgaaataagccaagtgcagaaagacaaacttcacatgttctcacttatttgtgggagctaaaaattgcaacaattgaactcatagagatagagagtagaaggatgattatcaaaggctgagaagggtagagggggtggggaatgggaatggttaatggatataaaaaaaagagaaagaatgaataagacctagtatttgttagcacaacaggctgactatagtaaaaaataatttagttgtacattttaaaataactaaaagagtataattggattgtttgtaacacaaagggtaaatacttgaggtgatgaccccatttaccctgatgtgattattatgcactgcatgcctctttcaaaatatctcatgtaacccataaatatatacacttactatgtacccacaaaattaaaaataaaaaaggaagtaaaaaaatgtaaattttattcatataagtttatgtaaggccaaggcacagtggctcacccctgtaatcctagcagtttgggagactgaggtgggtggattgcctgagctcaggagttcagcctgggcaacacggtgaaaccccgtctctagtaaaataaaaaaaattagccgggtgtggcgcctgtagtcccagctacttgggaggctgaggcaggagaatcacttgaacccaggtagcagagattgcagtgagccgagatcccaccatggcactccagcctgggtgacagagcgagactccatctccaaaaaaaagaaaaaatttatgtagtactagtgtaattttgtaacatggatatatttgcatagtggtgaagacaggactttgagtgtatccatcactggaaaaaagtacattgtattcattaagtaatttctcattgtctcctcccttcccactccccacccttctaagtctccactgtctattatttcacactctatgtttatgtgtgcacattacttagctcccacttatatgtgagaacacgcggtgtttgtctttctatgtctgagttgtttcacttaagattgggcctccacttctattcatattgctgcaaaagatataattttattctttttatggctgaatagtattctattgtgtatatataacacattttctttatccaatcatctattgatggacacttaggttgattccatctgtttgctattgtgaatagtgctgtgataaacatacaagtataggtagctttttgaaataatgatttcttgttttttgggtagatacccaatagtgggattgctggatcaaagggtagttctatttttagttctttgagaaatctctatactgttttccataaagattgtactaatttacatccccatcaacagcatataaacattcccttttctctgcatcctcaccaacatctgttattttttcctctttttaataatagccattctgactggcgtaagatggtatctcattttggctttaatttgcattcctctgatgttagggatgctgaacattttttcatatgcttgttaactattttgtatgtcttcttttgaaaaatatcagctgggcatggtggctcacgcctgtaattcccacactttgggaggccaaggcaggagaattgcttgaggccaggagtttgagactagcctgggcaacatagtgagactctgtctctctctctctttttttttttattttttgagatacagtctcactctgttgcccaggctggagtgcagtggcacaatcccagctcactgcaaccttcggcgcctgggttcaagcgattctcctgcctcagcctcctgagtagctgcgattacaggcacgtgccaccatgcctggctaatttttgtatttttagtagagatggggtttcaccatattggttaggcttgtctcgaactcctgacctcatgatctgctcacctcagcctcccaaagtgctgggattacaggcgtgagccaccacacccggcccaaccctgtctcttaaaaaaaaaaattaactgggtgtcatggcatgtgcctgtaatcccagctactcagaagactgaggcaggtggatctcttgagcccaggaatttgagtgagctaatattgtaccagtgaattctagcttgggtgacagagggagacactgtctctgaaaaaagaaaggaaaggaaagagaaagaagaaagagagaaagaaagaaagaagagtgagagagaaagaaaagaaagaaagaagagagaggaaggaaggaaggaaaagaaaaagaaagagagaaagaaaagaaagaaaggaagggaaaggaaaaggaaaggaaaggaaggaagaaggaaggaagaaagggggagggagggagaaaagaaaggaaggaaggaaaaatgtctatttatgtccttagaccactttttactttttttttttattttttttgagacagagtctctcacccaggctggagtgcagtggcatgatctcagctcactgcaacctctacctcccaggttcaagtgattctcctgcctcagcctcttgagtagctgggattacaggcacctgccaccacacccggctgatttttgtattttaggtagagatggggtttcaccatgttggccagactggtctcaaactcctgacctcaggtgatccgcctacctcggcgtctcaaagtgctgggattacagatgtgagccaccatgtccagcctttaccacttcttaatggggttgtttttgttgttgttgagttgtttgagttccttgtatattctggatattagtgttttgttaatatatagtttgcaattaatttctcccattcttcgggttatttgttcactttattgattatttattttgctgtgcagaagcttttccatttacttaagtcacatttgtctattttgttattgttgcctgtgcttttgaggtcttaatccggcattttttgcctagaccaatgtccagaagagaattccttagatttccttctagtatttttatagttttgggatttacatttaagtacattttgaattgatttttgtatatggagagagatcagggtccagcttcattcttctccgtatggcaatccagtgttcccagcactgtttattgaaaagggtgtccttaccccaatgtatgttcttgttgactttgtaaaaaaccagttggatgtaaatatgtggattttgttctaggttctctattctgtttcatttatttctgtgtatatttttataccagtaacatgctgatttgattgcaatagccttgtagtataacttgaagttaggtaatgtgttgctgtcagaggcattcgaaccagagcgactccattctgagggctaggaaagtgaggctgggaattgctgggcttcattcccagaaagttaggcatacctcgcttctaggtgtttacagttaaaggaacaaattaataatgtttaccaagacccagacttggtagtgtccagatatcccaatatctggagaacaaaggcatttctaattttgctttaaagataataatatcaattcttgcaaaatatagtaattaagaaaattaatcctttatcatggacccttatagcagagcacatctgcccatatatacaagcatcattgtacctagggtggatgcgttcctcctcttacttacagaaacatccaactctttctggggagtagctgttctttcaccactttactttcttaataaacttgcttttactttgcactgcagacttgccttgaactctttcttgcaggaaattcgaaaaccctctcttggggtctggattgggacccctgtcctgtaacattgcctccaactttgttctttttgtttaggattgctttggttattcgggcacttttttggttctatatgaattttaggattgtttttcctaattatgtgaaaactaacattggtattttgataagaattgcattgactctgtagattgctttgggaagtatagtcattttaatgatattaattctttctgaataattaatgaaattaattcttctgatattagttctttccataagcatgaaatgttttttccatttgtttgtgtcatctgtaattctttaatcagtgttttatagattttttctttttgtagaggcctttcacctccttggtgcaatatattcccatgtggggtggggtgttatttggtagctctcgtaagtggtattgctttctcgatttggttctcagctagattgttgttgctgtatagaaacactgctgacttttgtacactgactttgtatcctgaaactcctgaattaatttaactaatctaagagatttttggtggagtcttaagcgtttctagatgtaagattatatatcactgaacaggaataatttgacttcctcttttccaatttgcatgtcttttatttctttctcttgcctgattgctctggccaagacttcctatactagggttgaataagagtggtgaaagtaggcatccttaatcttgttctagtttttatcattcaactatttccccattcagtatgatgttggctgtgtgtttatcatgtgtggcttttattattttgagatatgttcattctgtacctagttttttgagcttttatcatgaaggatgctgaattttatcaagtgtgttttctaaatctattgagatgatcatatggtttttattcttcattctgtttttgtgatgtgttacatatattaacttgtgtgtgttggaccatttttgcattcctggtataaaacctactttatcatgctgtattatctttttaatgtgcggttggattcagtttgctagtgttttgttggggattttcacatccgtgttcatcggggatattggtctgtagttttgttgttgtgtccttgtctgtttttggtattaggatgttactggcctcatagaatgagttagggagatttcccttgtctgtgatttttagggacagtttcaggattattagtatagttctttttgtatgtttggtataatttttttaatgttgatttttaaatttttatttttttacttagagatgggatcttgttatgttggccagggtggtctcaaactcctggcctcaagcaatcctcctgtctcaggctccacagtgctatgattacaggcatgagccaccacatctggcctatttggtacaattttggtataaatctgtctggcccagagctttcatttttgggaatttttttattgctgattcaatattgctacttattattggtctattcaggatatctgtttcttcttggttcaatcctgggaggttatacgtttcaaaaaaacctataggttttctaggttgtgagcatatagttgttcatagtagtctctgatggtatttctgtggtattggtgtaatgtcttctttttcaattctggttttgttcatttgaatcttcttttttttcttggttagtctagccagcagtttattacttttgttgatattttcaaagaaccaactttttgtttcgtttatcatttgtgttgttttttagtcttgattttgtttaattctgctctgatctttgttatttcttttctgccaactttggatttgttttgttcttgttttcctagttccatggggtaccatgttaggttgttaatttgttacttttttgacagaggcatataattctataaacttccctcttagcatgacttttcctatatcccagaggttttgatatgttgtgttgccatttttgttcatttcaaacaaaatttttattttctgtttttatttcttctttgactcagagatcattcaggagcacattgtttaatttccatgtatttatacagttttcaaagttcctcttggtattgatttttagttttattcagcagtctgagaagatgcttgaaatgattttgactttaaaatttgtcgagactagttttgtggcctaacatatggtctaccttggagaatgtttcacgtactgatgagaagaatgtatattctgcagttgttgggttctgtaaacgtctgttagctccatttggtccaaagtccaacttaagtccaatttttttgttgattgtctgtcttgatgatatatctactactgtgtgtgaggtgctgaagtcccatactattattgtattgctatctatatctttctttaggtctagaaatatttgctttattaatttggcctctccaatgttggatgcatatatatttagtattactatattatcttgctgaattgattctgttatcagtatctcatgatcttctttgtctttttgtactgttttttatttaaagtctattttatctgatacaactatcacaactcttgctgaagcacagtggcgagatcataggtcactgaagcttcaaactcctgggctcaagatcttcccacctcagcctcccgagtagctgggactacaggttcaggacaccacgcactgctaatttttaaatttttagtacagacgaggtgtggctccgttttccaggatgatgaactcctgggttcaagcagtcctcccgcttcagcctccaaaagggttgggattataggcgtgagcccccgcaccctgcctgcaagtcttttaattcacttcaattatcttagaattttccttccccactttatacatacgtacagtggaactgagggtgtttgtctcaggtaaccgatcaatgaagtgaataacctgtagggggcagcagagcctaaggccagtgacaccctgctgaggccagtctggagccggcaaagggagggaaagggagctcccctgggtgtttcccgggcagcctgccctctactgcaggtggcctccagctgctcagaacagctgcggaaggaatgtggatcctgagaagctacagagccctggaaagcaggagactcacgtgcaggtgcactttgtgtaggggggttggggggaggttctgtccttactggggctgtacctagagcctagggacgttttgcgggggcagtgtttggtttttacgtgcaaagggtcccggcgacagactgtaatttgtacatacaaagataatctgtgaagatcaggctcagtaagatttgtctgacatgtcacctggagaaagggtttgtgaaggtaatagtttacttaggttagaagcttaaactgaccccaggtgagaacttctgctggtgaaaatgaagtctagggggaggaagcggttccatattcaggggtgggacggggggagtgtgaggaagtctcatccccaattcccgccctgtagaggacacctgcctctccctcctggtgcagtcttgcctggcctggcctggcctggatttccttcctgctatgaggcaaaggaatgactccattgaacaccgagtctggaattcccagcacacatttctgaaagatcgaggaagctaacagtgccccttctaacaataagtagcaagtttggctgaaatgcagatagccaacgaccagggcgcagggagtgagcttagccttagaaaggctgtagctaggattaatcagccgggctctgcagggctccgttacccagggcttaccctgtcactcagggctgaggggcggagcctggaaccccatccaatcaggggccctgggacggggccctgccaactgtcaatccggggaagcagaaggccgcactcagagtctctgcactcctttgttgctggggtccgttgcgttctgcatccagtccttgctgctccgagaggccccaggtgcctccgccacggctcctgtgacgctgtcacctgcgctgtgacctgctccggagtcataaagaggacgccgggacaccaagaagcagggaaatggtaaagtgcccggcctagcgtccagatacgtggaagaggggctgggtggaaccaacaggatcctgctgtggcgggacccaggcctccgctcgggcgaccccggcgattgggacccgcgtcccccatggcgtggcttggccctcggtccgctcggccgccaggtggggctgggcccgcagctgggaccccgggcgtcctgtcccgtccctacgcggcgactgcggccccggccccggagtcctctctgggcagctccgcgcccgcagcccggcgtcttcccagattgtgcgggggccacgggagggtcatggggggtcggatgtgtcccgcctttcttctgctaaaaattaaactgaggctctgttaacagttaaagagtttgttggagcaacagcgattccgagtgagaaacacccggtcatggcttgtgattgaagaaaaggcttttataagttgcatgaggaggcaaacaggattaaatacttgattagttacagtgatgctgtcgccgtatgtggacttgtcaacctgaaataaaagaatcagattccagttttttaaagtttactcaagcaagaagctgggaatggcccatttgggaaaacacaggatccacggaaatgggctcagtgtttcaaatttaaaagtttaagttcttgcttatataggcaagaaatttaacaggattacaacgttttttatacaaggctagtttgtgaggcacaacaatttaatcagagtttggcccgcccccctccccccgcccccatagagcttttttttttttttctttacatttgggtttcatttcctttccaatttaaaagagtatatttaacattccagcgtaaggcaaggtgatgccagcgtggacaacatggcgagaccccgtctgtacaaaatattttaaaaaattagtcgggtatggccgggcgcggtggctcacgtctacaatcccagcactttgggaggccgaggcgggcggatgacgaggtcaggaattcgagaccatcctggccaacatggtgaaaccccgactctaccaaaaatacaaaaattagctgggcgtggtggcacgtgcctgtaatccggctactcgggaggctgaggcaagacaatcgcttgaacgcaggaggcggaggttgcgtgagccgagatggtgccactgcactccagcctggcgacagagcgagactctgttaaaaaaaaaaaaaattagtcaggtatgatggccgcttctgtagttagtctggaggctgaggcaggagaattgcttgagcccaggaggtgaaggctgcatcaacgacagtattgaatttacagctaataggcaaggtgagggagaggatggaagttggtttagtgtcaagaattagggaagagattgtcaaacgtagggaaaagggacttgattggatatcaggtttgggggaattttctctaaactcccttagaagggtttttgctaccacagggctctgcaggaaaaggccaaagtctactcaagaagaggggggctctgaggagcctgactagtttgatcaaagagggagtttttgggacccctctcccagcctagttcttcccaggtatgacagtaaatccctaaatttctggttttctcctcacattcaaaaacaccaacttcccctcgccaattgacatccttatcaattatgtgtttcccatgctacatttgaaacagctgccatattttatcatttttccacagacaaatgaatagcactatttaaaaatgttatcaacacctctgaaaataaggaaaactttttttttttttttttttttgagacagtctcactgtgtctgttgcccaggctggagtgcaatggtgctatcttggctcactgcaacctcggcctcctgggttcaagcgattcccctgcctcagcctcccaagtagctgggattacaggcatgtgccgacatgcccggcagatttttgtatttttagtagagacacgggaaagaaaacattttttaaaaattttagtccaggcacagtgactcactcctgtaatcccagcactttcagaggcccaggtgggaggattgcttgagcctaggagttcaagaccagagtgggcagggcaacatagcaagatctcatctctactgaaaacaaccaaacaaaatagctgggcatggtgtcatattcctgtagtctcagctactatactcgggagactaaggcgggaggatcgcttgagccccgaagatccaaggctgcagtgagccttgagggcaccactgcactccagcctgggagacagggtgaaaattttcctcaaaaaaacaaaaactttagggcttggcatgctggcttacacctgtaatcccagcactttggcaggccgaggtgggaggatcacttgagtccagaagtttaagaccagctcagcaacatagagagaccccgtctctattaaataaataaataaaattttaaaaagaaaaaaattatattttgtttatgaatattttttatgagaggaaactattcagtaactacccaaaatgacattgggtaaaactccatggctgattcttgacattgatcatcttttcatgtgtttgttggccatttgtgtatgtctgggagaaatgtcattaaaatccattgcttggctggatgtggtggctcatgcctataatctcagcactttgggaggctgaggcgggtggatcatgaggtcaggagttcaagaccagcctggccaacatagtgaaaccctgtctttactaaaaatacaaaaattagctgggcatggtggtgcatgcctatagtcccagctactcaggaggctgaggcaggagaattgcttgaacctgggaggcggaggttgcagtgaaccaagatcgcgccattgcccatattttagtcaattagttttcctttttggtacaataatttttctagttaattacaataagaaaaaccttaaaaattttactagctcaagcattttaagtgtaccattgagttagtttgacaattttatataacttctctaagatgagtcatactgcatttttctttttctgactggtcttttgcagttagcttagtatcatgaagtttcatgcctgttgtagtatgggacaggatgtcattttataagaataaataatatcctgttgtatatatatatacattttcattatccattcatccattgattggcatttaggttgatctacctgttgggtgttgtgaacaatggatttcaattcattttattttattttttatagagattggatctcactctgttgcctaggctggtctcaaattcctgggctcaattgatcttcctgcctcagcctcctgaaagtgttggggttacaggcatcagccactgtacccagccatcgatggttttcaaatatttctttgagatcctacttttaattcttttgaattgaatataattcgacctaaaagtgggttgctggaacatttggtaattttgtttttaatttttgaggcactgccatactgtttttcatagctaagccattttacaatcccttggacagtgtacataggttccagtttgtcagcatgctcatcaaagctttccatttggcatgtttgatgtgttttttatagttgaattatggaaattctttatatttgctgaaaattaagaccataccagatatatgacttaccaacattttctccaaattgatgagttttcttttcccttgttgatagtgtgttcccttgcacaaaagttcttaattttcataaatcacattacctttttgttaagactgccccctcacagagtttttacctctaaaccttgtccccattcagccttcagcacttcatcaattacaatttatgttgtcttaccccagtattatttcccataatggttttggtcatgggtttctgtttcagttagttatgactctcttaatcagttgggttggtgagatcccatgcaaaattcggtttttgtttgtttttggatttgcctgtgctgtttgaatgagaatcaaatccactttccagataccatcaaaggttaaactttgtgaacacacattttcaagtatatgtagtctcaggactgctgttgtgagctttttctctgcacatgaattagtaggactctgttacaaaagatgctacacacccaatgtacagagagacattggggtacctaggaaacacatctttctctccggattcaccaaaaagagacattttcctattctttttttttttttttttccaagatggactctcactctgttgtccaggctggagtgcagtggctctctcttggctcactgcaacctctgcctcctgggttcaagtgattctcatgcctcagcctccctgagtagctgggattacaggcgcctgccaccacacccggctaatttttgtatttttagtagagatggggttttgccacattggccagcctggttttgaactcctaatctcaggtgatctgcctgtcttggcctcccaaagtgctgggattacaggcgtgagctaccatacctggccataaatttgttattttggaataattttagatttatagaaaacttgcaaagataatctacaaagttcccatatacccgtcacccattttcttctaatgtgagcatcttacataaccatggtccaacaaaactaagaagttatcatttgtatattactattaatgaaattccagattttcaacagtttttccactaatatcctttttctattccaggacccaatccagtataccccactgtatttagttctcatgtctccttgatctgctttgtgacaatttctcagtcttcccttgttttttaaaatcactttgacagttttaagagtgctggtcaggtattccatagaatgttcctcaatttggaatttttctcatgattagactggagttaggtgttttgcaggagaatgccacaaaggtgaagtgtccaggctcatcacttgatacacctggtgacagtaaccttgatcacttgattgaagcagtgtttgtcaggtttctccactttaaagttactatttttacccctttccatactctgttctttggaagtgagtcactaagtccagcacaggtccaagggaggagggccaattcagctccatagttctggaggctgggaagtctaagatcaaggcacgccaggcacggtggcttacgcctgtaatcccaacactttgggaggccaaggtgggcagatgacgagatcaggagtttgagaccagcctgaccaacatggtgaaaccccgtctctactaaaaatacaaaaattagctgggcatggtggtgcgtgcctgtaatcccagctactcaggaggctgaggcaggagaactgcttgaacccgggaggcagaggttgcagtgagccaagatcgcgccactgcactccagcctgggtgacagagtgaggccccatctcagacaaaaaaaaaaaaaaaaaaaaaaaagatcaaggcactggcaggtaccatgtccagagggtccattcctcatgaactccatcctcttgctgtgtcctcacgtggcagaaggctacattttcctattctgctgttgctttacccatagttacactctggcatcaaagttgctgtttgagaggaagtgagtgtagacaggggagtaagaggtctgatgacagaggcagggaataaatgtttggagtccacagcatcatgagaacttcttgggaatagagtctaggcccccagtgctgtcactctcacccatcctcctctacacatgtgagatgtttcaggacccagtggcctttgaggatgtggctgtgaacttcacccaggaggagtgggccttgttgaatcctttccagaagatctctacagagatgtgatgcaggaaaccttcacgaacctcatctgtataggtaggggtgacaatattacctccctcagtgaattgtagaacatatgtttctagttcatcagtgctattcagggatttggaatatggataggcaatccttcgatgaacaaatcaggcatggctgcagtgtcccataaacatggaatctaatgatttttaaataatcttatactaattcaggactattttttagggaaaaaatggaaagaccagaacattgaagatcaatacaaacatcccaggagaaatctaagataatttacactcacaagacaaagaaatgtctctaaagaaaatctcagattgtcagaaattgttaaaaagaagccaacaaaagaaataagctcagcataaaatgtatttattcttagaaagttttctcgaaaaacatatatttcaatgtgatatagaggtttaatgttcataaaatagcttacttggaaatagtattaagaaacctcagctggccgtggtggctcacgcctgtaatcccaggactttgggaggccaaggtgggcggatcacctgaggtcgggagttcaagaccagtctgaccaacatggacaaaccctgtcgctagtaaaagtataaaattatccaggcgtggtggcacatgcctgtaatcccagctactcgggaggttgaggcagaagagtcgcttgaatccgggaggtggaggttgcagtgagctgagatcacgccatggcactccagcctgggcaacaagagcaaaactccgtctcaaaaaaaaaaaaaaaaaaaaaagaaacctcatgtaaatattctttttttgatgatagatatagacaggccatcttgtagaatgtgtgatccattcatgtttaaacaattcagacagggcagaaagtctacacttcatgggataatgttaaaaatgcagctggacatggtggctcatgcctgtaatcccagcactttgggagaccaaggcaagaggaccacttgaggtcaagagcccaagatcagcctgggagacacagcaagactctatctctaccaaaaataaaaaattagctgggtatggtggcacacacctgtagtccaactttctggggagtctgaggtgggaggatcacttgagcccaggcggtgaaggctgcagtgtgttatgatcacaccactgcactccagcctgggtaacagagtgagactttgtaccaaaaaaacaaaaacattaaaaatgcaagtgtaatacttattaacaaatattaaatcgcttataaacagacccttaattatgtgcttggcatttttcacagaaattttatgggagagagactctttgagagtgcagaaggtagtcagtgtggagaaactttcacccaggttccggaagacatgctgaacaagaaaactcttcctggagtaaaatcatgtgaaagtggtacatgtggagaaatcttcatgggatattcatcctttaataggaacatcagaactgacactggacaccaaccacataagtgtcagaaatttttagagaagccatataaacataaacaacgtaggaaagccttgagccatagccactgctttcgaacacatgaaaggcctcacactagagagaaaccttttgattgtaaggaatgtgaaaaatctttcatttctcctgcaagcattcgaagatatatggtaacgcacagtggagatggaccttataaatgtaagttttgtgggaaagccttggattgtctcagtttataccttacccatgaacgaactcacactggagagaaacgatatgaatgtaaacaatgtggtaaagccttcagttggcacagttctgttcgaatccatgaaagaactcacactggggagaagccatatgaatgtaaggagtgtgggaaatcattcaatttttccagttcctttcgcagacatgaaaggacacacacaggagagaagccgtacaaatgtaaggaatgtgggaaagccttcaattgtcccagttcttttcacaggcatgaaaggactcacacaggagaaaaaccctatgaatgtaaactatatgggaaagcattatctcgccttataagctttcgaagacacatgagaatgcacactggagagaggcctcataaatgtaagatatgtgggaaagccttttactctcccagttcatttcaaaggcatgaaagaagtcacactggagagaaaccctacaaatgcaagcaatgtgggaaagccttcacttgttccacttcgtttcaatatcatgaaaggactcacactggagagaaacccgatgggtgtaagcaatgtgggaaagccttcagatctgccaagtacattcgaatacatggaaggactcacactggtgagaaaccctatgaatgtaagcaatgtgggaaagcatttcattgtgtcagctcctttcatagacatgaaaggactcacgctggagaaaaaccttatgaatgtaagcattgtgggaaagccttcacttgttccatatatattagaatacatgaaagaattcacactggagagaaaccttaccaatgtaaggaatgtgggaaagccttcattcgttccagttactgtcgaaaacatgaaagaactcacactattaatatatgagagaaatgctattttttaatttttattttaatagagacagggtctcactatcttgtccaggttggtcttgaactcctggcctcaagcatccctcccagcttgaagtgtcaataaaggaaggcaataaaatgtagagatggagttaggtgatgccacgctgggattcactggtggcctatcttacatatgatttcgaaggcagacatgaggaaggccttagtcacattttagagccagccaaattcacatgggctgtgtggccccctgattctagcccattttcctgattctctggcttgtcaatcaagagtatcctccaaatctcttgactttccttttttcagaggtgtaggtttccaaagatgtccccagaagctccacattcaagttctatctacagtttggtttttctttaagtattgtaatgtacataccagagagataatgcagactgtcatgggtggggaatgttctctgatgctcaactcccctagtctgcagattgagttggtaggaggtgtgatttgtttacatgcacctttgttcctgctggtagtgaccttgttcttgattcagcctgacagctactatgctgccatcagaaccaacttgatgagagctctgctgccctgtgcagtgactggtctcatccaggactctcatgtgagaaggaacaccttgctctggtcaggaaatgtccagtgtttcctgttatccacaggagaatgtaatgcctcagttcattttcagttatctttgattatatgtgattgacaatgtgtatttttgagggagcaaagatttctgtacatatttcttaaaaatagtttattcagctgggtgcagtggctcatgcctgtaaccccagcactttgggaggccgaggtgggcggatcacgaggtcaggagtttgagactagcctggccaacacagtgaaaccccatctctactaaaagtaccaaagttagccgggtgtggtggtggatacctgtaatcccagctactcgggaggctgaggcaggagaatctcctgaacctgggaggtggaggttgcagtgagccaagatcacgccactgtactccagcctggacaagagagcaatactctgtctcaaaaaaaaaaaaaaaggtttattcactgtttttcagttgtgtacttgcaaatgtttttctcttttttttgtatactgagaagctctattaaaatatcccttgtcaacatggatcagatcaaatgtatactgttaccaaattatttgtttgatattgtgaatcaatatcaccatgtgtataaacctcatttatttcctgatgtaaattatacatttcatgcatatctacttataatttttacctttttttttttgagacagggtcttgccttttaacccaggctggagtgcagtggtgcaatcatagctcattgcagctctgagctcctgggcttaagtaatcctcctgcctcagcctcctgagtcgctgggactacaggtgtgcaccatcatgcctggctaatttttttttaatttttagtactgaggaggtcttgttatgctccccaggctagtctccaactcctgggccaaagcaatcctcctgtctcagtcttccaaagtgctgagattataggcgtgagccactgttcccagccacaatttttatcttgaccataatttgtcattcttttataatccccgaagttaaatcttgctgttatggtgctgtgttgcccaaaaccaccagtactaaaaaaactgttgtcaaagaggatgtaataaattgtagtaataaatatgaccacaagccataaatgactgcaggacataccaataagagggttctctgtagaatttcttacaggatttctgttttaggtgcattgttctctattcaaggaggtgagtcatttttgtatattggatgctgtcaggatgtgaacttaattgtaccactgctaatcatagtagttctcacctagaaggagaaagaatggattggaggtaaacctaattgaagacaattgctggtcagtccattatgagaagaggggaactggaatttttggttatttttatgatttgaaatatgttttcttctatcccatctagggacgtggttacagaatgccctcgtttttgtcctgctccatcatggtcactgaggagcactgcttcacactgcaggtgtctgacatggcttaagatttggccttgtggtgaggggaggcagctcccagacttgtggacctgtttttgctttacttattctccaaaacctaagatatttcttagagtgtatgaacactgttccacaaaatgctccagttaaaaatatataaaatcacttactccttaggaagctgtataatacttttaaagaaattccttactgagtcaagtgtggtcaatatatttatgtaactgtctgaatgcacgcctaggaaggatgaaagtcagtatcactattccaaccaagcctttcttgctcagataatatgctcttgatgcacccctcttttttctttttgacacagggtctcattctatcacccaggctatgtggagtgcagtggcgtgatctcggctcactgcaatctccacctcctgggctcaagcgatcctcccaccttagcctcccaagtagctgggaccatgcccagctaatttttgtatttttttttttagagacaaggtttcaccatgttgcccaggctgatctcgaacaggagttcagcaacccttttatgccacactgtagagtaataggcaacatggaaaagttagttttatatattatgcagtggcatggaccaatccaatcacttttttgaagtgccagccaaactcttcttcagagaagcctgtttgaaaccccctagagtcaaaacctggtaccacaggacagagcagcaatgagtgaccaacccctgactctatgtgcagatgacacatccatccccagattaggtatcaacataagtgaaaggtactgtcattgcctgtcattttttttttttttgagatggagtctcactttgtcacccaggctggagtgcagtggcacgatcttggctcactgcaacctctgcctcctgggttcaagctattgtcctgcctcagcctcccaagtagctgggattacaggtgcccgccaccacacccggctaatttttgtatttttagtagagacggcgtttcaccatgttggccaggctagtcttgaactcctgaccttgtgatccacctgcctcggcctcccaaagtgctgggattacaggcgtgagctactgcacccagcccattgcctatcagtttttatagagtgtcgcttagatcaagaaagagatggtaatacagagttaggtgtgtctgaaaccaaacacgacctcatccttctcccttgaaggccaaatgcactctgagagtttggttagagtacaaacaacgccaccaacttcactccagatgtgattttctacaggaggcgggcactgtgttgggatggccagtgaaggtaaggaacactagaggtgcaggtttaggtgatgaacaggacacagcctggacattattagccttgactatggaggtgtcttgatgtttctcaaattgagaccagtctggccaacaggatactgaactggttttcgatggaaaaattcatctgtatagggatctattcgcttcctttaagtttcagtttcgttatgtggcatttagcatgagtgactccattttggtctgatctggtttctaagtgcctagtgcagaagctcagtccaaaacaatggcctcccataatgttcattttaacattttctttatactaatacattatatcaggtcacctcaaatgtcacctccacagagggttcttcctctcacctcagttagtcctacttctttccattcagttttttgttacactgcactttttaggatctgggaaatctaatcaaagttcacagggtttattgcttattctttttctttttctttttctttttttgagacagagtctctctttgtcgctgcccaggctggagtgcaatggtgtgatctcggctcattgcaacctccaccttccaggttcaagcgattctcctgcttcagcctccttagtagctgggattacaggcatgcaccaccacactcagctaatttttgtatttttagtagagatggggtttcaccatgttggctaggctggtctcgaactcccaacctcaggtgatccactcacctcagcctcccaaagtgctgggattacaggcatgaccactatgcccagccaggttcattactttttaaaaatcaatctatgaaaaattaaattggccaggcatggtgcctcagaacctgtaatcccagcactttaggaagctaaagtgggagggtcacttgaggccaggagttggagagcagtctgggcaacacagtgaaaccccatctgtacaaaaaatacaaaaattcgctgggcttggtggcgcacacctgtggtcccaggctctacttgggaggctgaggtgggagaattgcttgagtccggaagatcaaggctgcagtgagctctgtttgcaccactgtactccagcctgggtgacagagggagaccttgtaaaaaaaaaaaaagaaagaaagaaagaaagaaagaaagaaagagagagagagagagggagagagagaaagaaagaaagaaagaaagaaagaaagaaagaaagaaagaaagaaagaaagaaagaaagaaagaaagaagaaaagaaaagaaaaatcatgtaaatgaaaccaaattcagtgatgttaccttaactttttttcttttttcgggtagagacagggtcccactatgttgcccaggctggtctcaaactcctggcctcaagcgatcctcctaccttggccttccaaaatgctggtattactggtgtgagccaccacacctgtcctacctttatttctaataactgatatgccttacattaaaaagtcttttagaaaacacctttgagccattttccagataggggaagtcaatgaagctccctcttgtggtgagggcgactttaacatccacacatcctgtctgggggactggatttctgagttgtgctgagacttaagagtggaaaaaaagtctactctttttcctctgctctcacacaacacggaatacttctgtgaccaaatgcaaatatttgagaagtgtcccccacatgccaagcaaagcatcaattctgcaactgactccagctcgatgtcttctagttccaacactttctacctttacataaggtacaaaactgcctcagaaatcatctgaccatgtgtcccggtttgccagtgataatccttgatagtacctgttgtcccaacatagtttttcatagcacctcatcttgccatggttatctgtgtctgaacaatgaatatgtatgaatactttcacacataagcaaaattaggtttattaaatgaagtttccaggaatgttcaaatttcaacacctgatttaccttatcacaagttatggctgtgctaatttctccaggaaatattcacagaatattgaatttatcattgtaaggtgtggagcaatgaagatgcccaagaggccaggcgcacacctgtaatcccaacactttgggaggctgaggctggaggatcacttaagctcaggagtttgagatcaacctgaacaaccgaatgagacctcatctctaccaaaaataaaaaactagccaggcatggtggcaggcacttgtagtcccacctacttaggaggctgaggtgggaggattgcttgagtctgggaggttgaggctgcattgagtagccatcgcaccactgcactccagcttgggcgacagagtgagaccccgtctcaaaaaaagatggctaaaacataatttttttttttttgagatggagtctcactgtgtctcaggctggaatgcagtggcacgatcttggctcactgcaaactctgcctcccggttcaagcaattctcctgcctcagcctttcaagtagctgggattacaggcatgcgccaccattcctggctaatttttgtatttttagtagagataggatttcaccatgttggccaggctggtcttgaactcctgacctcgtgatccacctgcctcagcctctcaaagtgctgggattacaggcatgagccaccgcgcccggcctgcctaaatcataatttctatgacagaatttctcatttacagcttcccctgagaccatctttcatttcagttaaccctgctccttgggggttatatgtgagataaaagtgccatgctatatcatgttccctggctcagtcctacacagcatgtcctgaaaaatgggtcttcagtcactgtcaatgcaccagggatagatatacatagtactgagagcctctaaatctttaataagttctggcttggttagctcccttacaaggaaaaccttgctggagtccatagcagtgtgaggaagccttggccatgcctcatcccatttcccgcacgctggaagacatctgcctctctctcctggtgcagtcgtgccttgcctggtctgggctcccctcctgctctgaggcaagcgtatctctccattgaacactgagtctgaaatgccctgcacacacttgtgatcccgtgcagaaggaaggagcagggacagccccttgaatgaggaagctaacagtgcctcttctaacaataaggagcaagtcgccttgaaatgcaaatatctgatgaccagggctcaaggaaggcgctcgcttagagaggctgttcgcttagagaggctgctcgcttagagaggctgctcgctcagagacgctgtggccagaacaagtcagacatgatctgcaggacccggttacccagggcttctgctgtcactcagcacggaggaggcggggcctggcgccccatccaatcaggggtgctggggcggggccctgtcaactgtccatccggggaagggggaagggacagtcgccctccgtccattcctttagtgctgcgccgacagcggtcaggatctcggctttcttgcttcgagagggactaggtgcctccaccagagcttctgtcgctctgtaacctgcactgtgacctacactagtcgcgggagccacgcagaggacgccggaacaccctggaagccgagaaatggtgtgtgtgagggggctggcgtccgggcgactgggagaggggctggaatcggccggaaccggctgaggcgggacccgggcctccacgcggcgactccggggtcgtggacgcgagtcccctcggtcgcagggtggggctgggccggcagccgggaccccgggcctcctgtcccgtcccttcacggcgactgcggccccggctccggagcctaatctgggcagctccgcgtctccccacattatgcgggggccacgggagggatatggggggatcccgcctcggatatggggtttgttagaaacaagtgcccggtgccgcaaagaaaaccagcatctaggcagaaaattcctcagcaaagcaaatttatttctacacaagggtgcagcttgcgccagtcacaagagcacagcgagcggggtagggcaggggtttttctccttaacgcagtttctagcacttctgtgtcctttcctcattggctagggttggacctcacaatctaaactaactcgataggctaaggtttaaaattaaatagggtctggccaggcgcggtgggtcacgcctgtaaccccagcactttgggaggccgaggcaggcggatcgcgaggtcaggagatcgagaccatccctggctaacacggtgaaaccccgtctccactaaaaatacaaaaaaattaactgggtatggtggcgggcgcctgtagttccagctactcgggaggctgaggcaggagaatggcgtgaacccgggaggtggagcttgcagtgagccgagatcgcaccactgtactccagcctgggcaacagagcgagacaactgggcaactccgtcacacacacacacacacacacacacacacacacacacacacaaattaaatagggtctatgagacgggaaggaacagggactgtccgttactaggcgggaaggcgtatctggacttgtctgggcgcggcaaaagcgggaaggttgtttacagaacaggtagctaggagacaaggaagtcggtctcaagaaacaaagaacagcttactaaagcttttagaaaagtaatttatcatctctgacaggttcgtgtgggaggagtagcggtctttggggtccccagtgcccacttttttctgttaaaaattaaactgaggtacgttaacaattaaagagtttagggccgggcgcggtggctcacgcctgtaatcccagcactttgggaggccgaggcgggcggatcaggaagtcaggagttcaagaccagcctggccaacatggtgaaaccccatctctactaaaaatacaaaaattagctgggcatggtggcgcgtgcctgtaatcccagctacttgagaggctgaggcagaagaattgcttgaacccaggaggcggcggttgcagtcagccaagacggcgtcactccagcctggcaacagagccagactccatctcaaaacaacaacaacgattcacgaatgagaaacacccagtcctggcttgtggtttgtcaacggaaaaagccaagctatgtaaaataaagaagtttattaggagccgaataggagagccgttggccgagggaaacacaaccccaagcagcctggagtaagtggtcccgaggcagctcaagacagtttggttttattcatttcagagagacaggaattgcagggaaaatcatgaatcagtgcctggaaggtgtaagttccattggcagaaagggtgggacctgtggaaggggggttagaaggcacaggtagttgagggattctgtaggtggcagctggttgagagtgttgaatctttgtctaaagtttggaggaggtaggaaggaatgctgaaggaagggggtctgttatctgccacttcattccatcccagccaaaaaacagacctgtttctcgagattttatgaattctaaggcgtaactttacctttgccttgcgtggccttaggtcttgtttgtaatttggtatcttgttgccacaaggagtctgtttttccagtcagataatgtctgtttttacatgaatgtgcgtcagttgctgcatgtaaactcctaaagggagagggtataaggagacctgtctcacctcccatcctgtcatacagaggcactcaattttcagggttttttgggggttcccttggccaagagccagtcacttcacttagctgggaaggtactttgtttttgtttttgtttgagacagagtctcctgtagcccagggtggtgtgcagtggctctatcttggctcactgcaacctccaccttccgggttcaagcgattctcctgcctcagcttcccgagtggctgggattacaggcatgtgccaccacacccggctaatttttgtatttttagtagagatggggtttcaccatgttggccaggctgttcctgaactcctgacctcaagtgatccactggcctcggcctcccaaaatgctgggattacatgtgtgagccacctcaccaggccagaaggtatgtttttatttttagtttacaggttgaaggctggacttttataaggtacatgaggagacaaaccagataaatgcttgattggttgcagagatgcagtcaccttatttggacttgtcaacccgaaataatcgaaagtttcagatttcaactggaagagtttattcaagcaaaaagatagcaatggcccatttgggaaaaacacagactccagagaaatggactcagtactccaaaattggaagttaagttcttgcttatattactgggaaaagaggtcctgatcagatcccaagagagttcttggatctcatacaggaaggaattcaagacgagtcggaaagtacagtgcaaagagagtttattgaaagctactctgggccagcatgatggcttaggcctgtaatctaagcactttgggaggccgaggtgggaggatcacttgaggtcaggagtttgagaccagcctgggcaatatagtgaaaccccatctcttccaaaaataacaaaaattagccgggtgtggtggcctgcacctgtagtcccaggtactcgggaggctggatgggacaatcacttgaacccgggaggcagaggttgcagcccagctgaggacacgccactgcactccagcttgggtaacagagtgagaccccatctcaaaaaacaaaaacaaaacaaacaaacaagacagagttcaagaccaacgtggccaacacagtgagaccctgtctctatttaaaaaaaaaaaaggaaagaaagaaagaaagcctctcttacagagtagggcatcctcctaaagcaagtggaggaacgtactgtctaagtttttcttatgtagggatcttgtctatgtaaaagactaaactgagctgtgcctacgtgcatgtgggctgacagcgtcacaaaatttattactctgttgatttaaagaaaactatcctttacattttagtgcatacaagtgcattaaaacataactataattatcaggccaggtgtggtggctcacgcctgtaatcccagcactttgggaggccgaggtgggcggatcacttgagattaggggttcgataccagcctgatgaaaccctgtctgtactaaaaatacaaaaaaaaattaactgggcatggtggcatgtgcctgtgatcccagctactcgggaggctgagacaagagaattgcttgaacttgggaggtggaggtgcagtgagccgtgattgtgccattgcactccagcctgggcaacaagagtgaaactctgtctcaaaaaaaaaccaaaacgaaacaaacaaaaaaaactataattatcttgaaagcacatattattatgggtattgggacatcaggacattctgttgttgtgggagtgtaaggatacttgcaggcatcttcaggctgtctccttcatgggaaacattttgtgatcatgggttgcgactggcaaggagtgtttcttgttagtctcaagatggagctgaacttaaattggtgtgttactctggctcccctaggcacctgcttccctaacacttatataggcgaaaggcaaataaatataacaggattacattttccatagaaggctgatgtatgaggtacaacaatttaattattattattattattattatagacaatatcttgctctgtggcccaggctggagcagtggtgcgatcatggcttactgcaaccttgacctccccggctcaagcacctccgcctcccaagtagctgagactatagtcgcccaccagcacacctggctaattttttattttttacagaggtggggtcccaatacattgctcaggctggtctctagctcctggcctcaaacagtcttccttctttggcttccaaaatagctgagattacaggcgtgagccactgcacctggctaacaacctaattcattatggttttttttcccccagagcttgttttctttaaagctcgtttttatttccttttcaatttaagagtgaatttaacattccagctgaagacagtgtgatagccatgaagtctttgtgtgagaaagttaagagggaagttagtctactacagagatcagtagtgaagagaggccctgtgggatggctcacacctgtaaccccagcactttgggaggccaaggcaggtggatggcttgatctcaggagttcaagaccagcctgggcaacatagtgagaccctcccccccatctcaattatgaaaaatcatattaaattttaaaaaaatagtgatgagggaaagggtctttcctgttttccctcagtcatttacaacattttacaaaacagtataggtaagaaagaaggcgaatctgtaatcagggaaaggagggttccaactggctatgtaaaagctgtgtgtcaggtgactcaactccatgatcacattgcttaaagataatttagagattaaattttttaattacttgtgttttgtttgtttgtttttttgattttttttgagacacaatcttactctgtcacccaggctggagcgcggtggcaccatctgggcccaccgcagcctctgcctcctgggttaaagtaattctcctgcctcagcctcccaagtatctgggattacaggtgcgtaccaccacacttggctaatttttatattattagtaaaggtgggggtttcaccatgttggccaggctggcctcgaactcctggcctcaagtgatccgttcgccttggccttccaaagtgttgggattacaggagtgagccaccatgcctggcctgacttacttgttcacacagcctatataggtagaagatttctagtcatgtaatcacaggttaattggtggattatgcctgattaagcataaatttcatttccctataaattagtaattttcaagtgttttatttaaatttgattttagtgtccttaggtaggaccttagaatactacacacagtttggtctcattgcttcttatttaaattttttcacactttccagggtgagtggtttcccactacaatttccaaatatacgggatgcagggcctcaaatcctccaccctcataccacagcctgactcttcaagggcttgcagtgaaatctgtgtctgaacatttcacatgagaggaaagcagagaataaccactagacattttcccgagaaaacctttctgcctctcctccttttatctttcctagacacagtcacctatcaggatgtctttgggatgaggttcctttgtggaaactttacagggtgatgtgtcttccatacaccctcgtatcctttttgtttgtttgtttttgagacagagtctcactctgtcgcccaggctggagtgcagtggcgcgatctcggctcactgcaagctccgcttcccgggttcatgccattctcctgcctcagcctcccgagtagctgggattacaggcacctgccaccacgcccggctaattttttttgtattttttgtagagacggggtttcaccgtattagtcaggatgttctcgatctcttgaccttgtgatccgcccgcctcggcctcccaaagtgctgggattacaggcgtaatccggccactgtgcccggccctacaccctcctgtcttttccaggtttcgggttttagaacggcctggggatgactcaaaatccccacgactgccctgtctcctggagggtctagtggctatcagtgcctaggggagtggagcctcctgagggagcagctgaatgaataatagtggaggagatgcctggtatgctcttcatctacataaccaatacttggggtgctcagcttctctctcccaactccagtttccattcattggagacacatgaccgtcagccaattggatgttgctattgaggaaaaggagaaatgattcctatcttctggattgtctcatctctgaagagagaactcagagaactcccaaaagacaaggaaaggccacttcaacggggtggagcaatagcctgcaaagcaaaatatacatgggggtacacaggggacacaatgccgtgttggtgggaaatagtcaattagcacttctcctttcctctatgtgaaatgttcagagaatcaccaccagacactttcctgtcaaaatatgcatgcttctcctccattcatctgttctggaaacagattttatcagattgtcttttggttgaggctcccctttggaaacttcaaagggtgttatgtcttcagcgcactctcctatgttttcttggtcctgggtggcagaattggggtgacctaatatgcccacagttgccatgtctcttggagggtctagtgagtatcagccggagtcactcctcccaggggacagactgaggtaggagaatggggactcccaagagagcagctgaatgccttgtgatggaaggagactcctagtatactctgcatctagatagccaacccctcgagatgctcagcatttctttccaaaccccagtttcctgaacttggagacctatggctggtcagccagttggatggtgctattgagagaaaagagaaatgcttcctgtcctctggattgtgtcaactgtgaagggagacaaaaccccaaaaaacaaagaccaccccagcagggtggaccagtagcctgcaaatcagaatatgaaagggggcacacaggggggtatagtgcagtgttggtggaaagtagtcattgagcgcttcggtgagcaggatgggggtggagagatgtctcatgtgatagggtgactgtgctgacacatgagtcagacatcactgtgttccagccagcacggcccctctgtgggcttgtcccttgtaaagaattgttcatagattgcagcttgagtgtttcaaattaactttacattgcatttgtcactagaaccaaatccaagaatgattgcgtaggtcagtgagacacagaagaggcaactcaacaaagcccatgacatacagtgcatggctcacaatcccaggagatgagggcagcacagctgcagagcaacacagagtggggggaacatccaggatgcacattcaaccagtaggtggggagcaagacagacagggacctgtgggccaaagcgtttcttggggtctagggaattgaccaaggaggtgtctcttggggagttgtttctggtggatttagagcaagcaggcactagttctgtgaagtcgcactgtgattaagaggtggtctgtaccatccatgtggggtgtaagggtcagtggtacaagtcaaattggttatatctagctgtcccacagggaggtggtcaccagaatgcagttgtgtaataaatatatgtgagttgaccacatggaggaactgggagaaagtggagaactagaaactctgttgagtttgaataaagttttcttccgttatgagaaagttaaatccttaaagaaaatgcatgctaaggtaacatataattataagaactcagtataagaggcaactctagaattaattaaattattgtatatggagatgacaggtagtggattgattattctcctgtagataaccatttgtccctgctttttctgttaagtgttcaccacttgtatcattggctggcaatacctggtttgtcatagtttcacattaccttaaacagatgcccagactgggcacagtggctcatgcctttaatcctagcactttgggaggctgaggcgggtggaacacctgagatcaggagttcaagatcagcctgaccaatatggtgaaaccctgtctctactaaaaatacaaaattagccaagcgtggtggtacatggctgtaatcccagctactcaggaggctgaaacaggagaatcacgagaacctgggaggtggaggttgtagtgagccaagatcacaccattgctctccagcctgggcaacaagagtgaaactccgttaaaaaaaaaaaaaaaagatgccctggtttcacaatttgctttttccattggtctatctttgtctctctgataataccattttctcttaattagtatagcattcaaagctgcagtgtttagtgggtatattgcctgtctatcttagtcatcttgggctgctatatcaaattaccatagactgggtgacttaaagaataaacatttctttctggcagttcttgaggttgtgaagtccatgttcagggagctggcagatctagtgtctggtaagggcccacttcctggttttgcagatggtcatcttcttgtgtttcttcatgtgacagaggagaggaagccggctctcctgtgtcttctcataagagcactaatctcattcagaaaggatcgactcttatgctgtcatctaatcctaattacttttcagagatgtcaacttctaatactatattgggggtaggttattaatatgtgatttttttggagtgatgcaaatattcatgccgtaacacccccccaaccatactctatagagcatcttggctattcttagtcattgtgttatatttcagtttttagaagtagtttttccttaattttagtgaaaaaaacaaactgccttgtaaatttcatggactaaaatataactgtagtcatatttcagaaacgttacatcatagtgctatttaatctccttttaaggacacatgacattttttcatttatttcattttatattgatgtttttcagtgtagactttttgcataataatcattttatatccttcctgagacttttttggacttgaagaaaattagttttaatagaaattagtggctgggcgtggtggctcatgcctgtaatcccaatatttgggaggccgaggtgggtggatcacctgaggtcaggagtttgagaccagcctgacaaacatggagaaaccctgtctctactaaaaatacaaaattagccaggcctggtggcacatgcctgtaatcccagctattcgggaggctgaagcaggagaatcacttgaacctgggagtccaaggttgcggtaagccaagatcacaccactgcactccagcctgggcaacaagagtgaaactccatctcaaaaaaataaaaaaaaaatgaagagattattccagtgtcggcaacatggcaaactttgcctatacaaaaaattacctcgtcattgtgatgtgtgcctgtcgtcccagctactcaggaggctgaggtagaaggatctgttgagcctaagagttcgaggctgcagtgagctatgattgcaacactacactccagcctgggcaacagaatgataccctgtttcaaaaaaaaaaaaaaaaaaagaaaagaaaagaaaaaagaaaaaaattagtttcaataggatatgctgtcttttaaaaattacattcagcaacttgttgctgataattaaaattcgctgagatttatttctgtatagagtgtgcattctagaaacttactaaaaatattatgtatgcacaaaatacataaaagaattgcacaatgaattcaaataatgatggaaccagtattgggaataagataactgccttacttttccttatactttctcaacctgggtatgcatcctcatcagtgtgttttatttttgcatgttttttatgcaaatgataaccgatatgtgatattttatatcggattttattttaactcagttatgaaccttatatggaatgatagttaattcactttcttatttaatggattttattatttagaacagtggttgtttccccaaaacattgggcagataatccacagagttccagcatttttattccaggctcatagttccccccaccaccctttttttttttttttttttgagatagaatcttgctctgttgcccaggctggagtgcagtggcatgatctcggctcactgcaacctccgcctcctgggttctagcaatccttctgcctcagcctcccgagtagctgggaatacaggcgcacaccaccacacccaactaatttctgtattttttagtagagagagggtttcaccatattgaccaggctggtctcaaactcctgaccttgtgattcgcccacctcagcctcccaaagtgctgggattacaggcgtgagccaccgtacccagcatagttccccctattctaaacatcttgactggccaggtgctgagccttatacctgtaatcctaccacttaggtaggccaaagcagcaggacagcttggactcgggagttggaggccagcctaggcaacatagcaagaccctgtttccaaaaataaaaaaaataaaaaataataaaaaataaaaaataaaaactgtttgaaaccaaagaaaccatattgactttgtgtagtgtatcctgcaactgatgcaagaatatattacatgtgaacatgatggaaattgaagaagccaatgttattattacctaaagtccatcttttacattaggcttcactctttgtgttctgtggtttaagacaactatgtgtcatgtatccaccatcacagtcttatagagaagtgttttactgccctcaaaatcccctgtgctccttctaatcatacctctcccctccctcttttgccacccctatttatccctggcaacaaatgatgatgttcctgcctctagagttttgcattttccagaatatcacatatttggaatgatactgtaagtggccatttcagacttgcttctttcatgtaaaaatatgctttgaaggtctctaaatacctttgttgcttgacaactcatttattttttatttttctttctttatctaaagatttttgttttgtgagagacagggtctcaaactccccagctcaggtgatcctcccgcctcagcttcccaaagtgcctgaattccacttgtgagccaccatgtccggccactgattttcttttttttttcttttcttttcttttctttttttttttttttgagacagagtttcactcttcttgcccaggctggagttcattggtgcaatcttggctcactgcaccctccacctcccaggttcaagcaattctcctgcctctgcctcccgagtagctgggattacaggcatgcaccatcacgcccggctgattttgtatttttagtagagacggggtttctccatgttgaggctggtctcgaactcctgacctcaggtgatccacccgctcggcctcccaaagtgctgggattacaggcgtgagccaccgcacgcggccagggccactcattttctttcatcactgaataacattctattgtacggatgttaccatagtttgtttctttattcacctgttgaaaggctcatcttgagcctggtgtcacgcctcatccctgagttcccagcacatgggagactgagatgagattgcttaaggccagaagttagagaacagcctggtagataccgtgtgagaccttatctattttttttttttaagactcaccttgtttgattctagtttttggcagttatgagtaaggctgctaaaaacgtttgtgggaggactttcgtgtggacatcagtttttagttcatttgagtcaatatgtaggaatgagactactgaatcagtaagaccatgcctattttcttcagagctccgcagactgtcttccaaattggctgtagaattttccattcacatccctagtgaaggagagttcactgtctccagcatttggaagtgtcagtgttttggattttagctactccaccaggtatttgctggtgcttcattgttgttttccttttttaattttttttccttttttttttttttttggagacagagtttcaaatcttgttgcccggaccggagtacaatggtgcgatctcagctcactgcagcctctgcctcccgggtttaagcgattctcctgactcagactcccgaatagctgggattacaggtgtatgctgccacacatggccactgtttgtattattagtagagacagagtttcactgtgttggccaggctggtctcaaacttttgacctcaggtgatcaacctgcctcagcttcccaaagagctggattacaggcatgagccactgcgcccgggctgttttcatttgctctttaataacatgtaatgtagagcatcctgtcatatgtttgtttgccataattacattctttagcgggaggtatacttggaaagattgggcttttttttttttttgagactgagtctggctctgtcacccaggctggagggcagtggcgtaatcttggctcactgcaacctctgtctcccgggttccagtgattctcctgcctcagcctcctgagtaactgggattacaggctcatgccaccaggcccggctaatttttgtatttttactagagacggggtttcaccatgttagtcaggctggtctcaaactcctgacctcggtgatccacccgtctctgcctcccaaagtgctgggattaaggcatgagccaccgcacccagcgttttgcttattttttgattggttggtttttttcttatagaattttaggagttcttcataccttttgggtaccagttcttgatcagatagctgttctgcaaatattttgtcccagtctgccgcctgtctttttattctgttaacagtcttttccaaaacatttttgttttgaatgaagtccaatttattgattttctcattcacagatcatgctttttgtgttgtgtgtgaaatcttattgccaaatcaaggtcgtcttggttttgacaagtgtgaaattgtgagttttgcattttccatataagtaaacgattcattaggaagtagttttgtaaaaggtgcagttctgtgtctaattcatttctttgcatttgctaattcaggtgtttcaataccatttgttttgtgccaccatgtctaattttttattttattatggagacgggtatctccttatgttgcccaggctggtctcgaactgcggggctcaaatgatctgtccgccttggcctccagcttgcatttttaatacacgtctttatagtagatttttctgtgttcctagtgcctctcttgtcatcttatggaatcttctcttatatatttagtttattgagtgtttctaatcatcaggagatattaacttatttatgctggaggttgcacttttttgaattgccgacgtgtgaaaaatcagactttggccatgaccttgagcagtaggatataaataactcccacatgcttagcgttccaaaaatggaacactaggcataaattggttaaggcttgtcagatgccttttctgcctctattaaggacattcttgtggtgttttgtttgtttgtttaaagatagagtctcactctgttgccccggctggagtgcagtagcgcaatctcggctcactgcaacctctgcctcccagattcaaatgattctccacgtcccagtcaagtgactgggactacatgtgccaccacgcctggctaatttttgtattttttagagatggagttccaccacgttggccaggctggtctcaaactgctgacctcaagtgatcttcccacctcaacctcccaaagtgctgggattataggcatgagccaccatgcctggctgctaccatgatttattatcattacttatcttaaaacaaaatgtaaaacttatcagcttaagaaattttacatgtacagttgagatagtttgacaaatctacataagttctctaagatgaattctattgtattttgcttttttcaattatcccgaggtgtcatgcatgttgtagtttagtccaagatgttattttttctttttctttttttttttttttgaatcaagtttcactcttgttgcccaggctggagtgcaatggtgcaatcttggctcaccacaacctccacctcccagcttcaagcaattctcctgcctcagcctcctgagtagctgggtttacaggaaagcgccattacacccggataattttgtatttttagtagaaatggggtttctccatgctggtcaggctgatcttgaactccaaccctcaggtgatctgcctaccttggccttccaaagtgctgggattacaggcatgagccaccacgcctggctaagatgtcattttctaagagtaaataatatcccattttatgtatatgcttaccacattttgtttttacattcagccatcaatggatatgtgggtggctgcattgctcattactgccacctcaggaaggtcgtatagtggttaaatctgtgcttatgatacctgggtatctcttaggagtttcttgtttgccctcttgtgtacatacggtgccaggttttgcttaggaatgtcccctttgccctatcagcatctatctagctacattctgacaggataactgcaaagtgaatgattcctgggcatcataatggaagtttctttctacctaggtgattcccctcctctctgcttatatctagcatgcctgatttgggtggtccctgggggtgtgggatttcccaggggctccccctcctgctctttgctacctacatgcttcctctgacaatatcatcaaagattacactttgagaacaggcattttcaaggatacacagcctcaggactgctaatgttaactttgttttgcctatgaattcgtaggactctatcatgacaggtgctacagacccacagtccaaagagacattagggacagcccaggcaacccgcttttctccctgggttcggtaaatacatttcctatcctgctgtggctttagcccttgttcagttctagcatcacaattgctttatgaactagccaggtgtggtggcacatgcctgtggtctcaactactcaggaggctgaggcatgagaattgcatgaacccaggagtaagaggttgtagtgagccaagatggtgccactacactccagcctgggtaacagaatgagacgctgtcttaaaaaaaaaaacaactgctagctgggcatggtggctcatgcctgtaatcccagaactttgggagcctgaggcaggcagatcacctgaggtcggcagcctgaccaacgtggagagactctgtctctactaaaaatacaacattagccaggcatggtggcatatgcctgtaatcttagctactcaggaggctgaggaagaagaagtgctagaaccccggcagtgagccgagatcatgccattgcactgcagcctgggcaacaagagtgaaaaaaaaaacaagttgctttgtggaagaaagtaagtatacacagggagaaagagatctgatgaccaaagcagggaatacgtgtttggagtccacggcatcctgagaacttcttgggaatagagtctaggcccccagtgctgtcactctcacccatcttcttctacacatgtgagatgtttcaggacccagtggcttttaaggatgtggctgtgaacttcacccaggaggagtgggctttgctggatatttcccagaggaaactctacagggaagtgatgctggaaactttcaggaacctgacctctttaggtaaggatgacaatattccttccctcagtccattagtgaaccagtgtttctagctcattaatgctgttgagtgatttagaacatagacaggaaatactttgatgaataaatgaggtatggctgcagtaaatcatgggcgtagaatctaataattttttcacaattttatactgcctcaggactattttttctgtgtctgtattttaggaaaaaggtggaaagaccagaacattgaatatgagcaccaaaaccccaggagaaacttcaggtaatttgtacttacaagacaaagcagtgtctctctagacaatcttagaatatgacaatatattaaaaataagtaaaacaaagaactaagtccaggatcaaattcatttatttttagaatatttgatcaaaaaacatatatgtaaatgtgacctaggctgtgggctcactcctgtaatcccaatcctttgagaagtggagataggaggatagcttgaggccagcagttcaagaacagcctgggcaacataacgagaccacatatcaacaacagcaaaaaattagctgggcattgtggtctgtagtcccagctactcaggaggctgagtgaggcaggaggatcacttgagccagtaaaggctgcagtaagctatggtgatatcaccacactccagtgtgggcaacaggataagaccctgaaacaaaagaaaaatgacacagagtatttagtattttaaaatagtttacatgggaagagtattaagataccccatataaacagttttttaaataataggtatggctgggtcaccttgtagaatatgttgtccagtcaccttcaaacaattcagacagggcagaaagcctacactttgatggagagtgttaaaaatgcaagtgcaatacttgttgattaatatagaagtacttataaacaaacccttcataatatgcttctcatttttgacaggagtctcatagaagaaaaagtcaatgaaattaaagatgacagtcattgtggagaaacttttaccccagttccagatgacagactgaacttccaggagaagaaagcttctcctgaagtaaaatcatgtgaaagctttgtgtgtggagaagttggcctaggtaactcatcttttaatatgaacatcagaggtgacattggacacaaggcatatgagtatcaggaatatggaccaaagccatgtaagtgtcaacaacctaaaaaagccttcagataccgcccctcctttagaacacaagaaagggatcacactggagagaaacccaatgcttgtaaagtatgtggaaaaacctttatttcccattcaagtgttcgaagacacatggtaatgcacagtggggatggaccttataaatgtaagttttgtgggaaagcattccattgtctcagattatatcttatccatgaaagaattcacactggagagaaaccatgtgaatgtaaacagtgtggtaaatcctttagttattctgctacccatcgaatacataaaagaactcacactggagaaaagccttatgaatatcaggagtgtgggaaagcatttcatagtcccagatcctatcgtagacatgaaaggattcacatgggagaaaaggcttatcaatgtaaggaatgtggaaaagcattcacgtgtccccgttatgttcgtatacatgaaaggacccactctaggaaaaatctctatgaatgtaagcagtgtgggaaagcattatcctctcttacaagttttcaaacacacgtaagattgcactctggagaaagaccttatgaatgtaagatatgtggaaaagacttttgttctgtgaattcatttcaaagacatgaaaaaattcacagtggagagaaaccctataaatgtaagcagtgtggtaaagccttccctcattccagttcccttcgatatcatgaaaggactcacactggagagaaaccctatgagtgtaagcaatgtgggaaagccttcagatctgcctcacaccttcgagtgcatggtaggactcacactggagagaaaccgtatgaatgtaaggaatgtgggaaagccttcagatatgtgaataaccttcaaagtcatgaaaggacacaaacacacataagaatacactctggagaaagacgttataaatgtaagatatgtgggaaaggcttttattgtcccaaatcatttcaaagacatgaaaaaactcacactggagagaaactctatgaatgcaagcaacgttcagtagttccttcagtagttccagttccttttgatatcatgaaaggactcacactggagagaagccctataaatgcgagcaatgtgggaaagccttcagagctgtgtcaatcctttgaatgcatggtaggactcaccctgaagagaaaccctatgagtgtgagcaatgacggaaagccttcagatctgccccacacctttgaatacgtggtaggacacacaatggagagaagccctatgcatgtaaggaatgtgggaaacccttcggatctgcccagaaccttcgaattcatgaaaggacacaaacacacataatgcactctgtagagagaccttataaatgtaagatatgtgggaggggcttttattctgccaagtcatttcaaatacatgaaaaatcttacactggagagaaaccctatgagtgtaagcaatgtgggaaagcctttgtttccttcacttcctttcgatatcatgaaaggactcacactggagagaacccctatgagtgtaagcaatttgggaaagccttcagatctgtcaaaaatcttcgatttcataaaaggacacacactggagagaaaccctgtgaatgtaagaaatgtagaaaagcattccataatttctcttctttgcaaatacatgaaaggatgcacagaggagagaagctctgtgaatgtaagcattgtgggaaagcattcatatctgccaagatcctttgaatacatgcaagaacacacaatggagagaaaccctatgaatgtaaagaatgcagaaaagcattcagcttgcctacttcctttcatagacatgaaaagactcacactggaaggaaacactatgaatgcaagcaatgtggcaaagctttcacttcttccagttcttttcaatatcatgaaagaacacactagggagaaaccctatcaatgtaagcaatgtgcaaaagcctttatttcttccacttcttttcaatatcatgaaaggactcacatgggagagaaaccctatgagtgtatgccaagtgggaaagccttcatttcttctagttcccttcaatatcatgaaaggactcacactggagagaagccctatgaatataagcaatgtgggaaagccttcagatcagcctcgcaccttcaaatgcatggaaggactcacactggagaaaaaccctatgaatgtaagcagtatgggaaagcgttcagacctgacaagattctttgaatacagataatgaatgtaaacaattaactgtttataataactgtatactaacaaatgatattctttttaaataagaagctataatatcccattggtgtcatgtattagatcagccttatactgttaaattgttattatttggacattgtgagtcagtataaccatgtggataaaatgccagacatctttttattcgaaaattttacttttcatgcttctgtacttacatttttatctcaaccttaatttttctttctttttttttttcccccagaaagaatctcactctgtcacccaggctggagtgcagtggcatgatctcaggtcactgcaacctctgcctccagggttcaagcaattctcctgcctcagtctcctgagtagctgggactacaggcatgcgccaccatgccaggctaattttttgtattttttagtagagacggggtttcaccatattggctaggctggtctcaaactccagacctcatgatttacccacctcggcctcccaaaatgctgggattacagacatgaaccatcatgcccagctgcaaccctaatttttcattcagtcataataccaatagttatctcatgcacctctgagtgccttcttccccaaaaccagcagtgccatacctgctgtcagcaagggtgtaatataccatagtgataaatatgaccaaaagccataaatgactgtgagatgtatgagaattacaagtcacattagtaagaagagaaaaattttggtcatgtttatgatttgaaatacgttttcctctatcacatttaaaaatatagttacaaaatgcccttgtttttgtcctgattcatcatggtcactgaggagcatcgtctcatatgcctggtatgtgacacgtgtctctccaacaataaaagacttggccttggctgggcatggtggctcacgcctgtaatcccagcactttgggaggccgaggtcaggagttagagaccattctgaccaatatgatcaaaccccgtctctactaaaaatacaaaagttagcagggcgtggtggcatgctcctgtaatcctagctattcaggaggctgacataggagaattgcttgaatataggaagcagaggttgcagtgagccgaggttgcaccattgtactccagcctgggcaacaagagtgaaactctgtcttaaaaaacacaaaaaaagacttggccttagggccgagtgcggtggctcacgcctataatcccagcactttgggaggccgaggcgggcggatcactaggtcaggaaatggagaccatcctggccaacacagtgaaacccagtctctactaaaaaatacaaaaaattagtgaggcgtggtctcaggctcctgcagtcccagctacttgggaggctgaggcaggagaatggtgtgaacctgtgaggtggagcttgcagtgagccaagatcgcgccattgcactccaacctggacgacagagcaagactccatctcaaaaaaaaaaaaaaaaaaaaaaagacttggccttgtggtgaggggagggcatctgtaaactcctggacctgtttttgccttacttattctctaaagactaaaatatttcctaaaatgtacaggcactgtttaccagaaagtaccttagttaaaacatataaatttgtttatgccttataaagctatattttttcaaattgctttactgagtcataggaggctaataaatttgtgtaaattgtctaaatacaagcctgtcttatatttctctgataatgtgctgctgataatgtgctgctgaggctaactttctctgataatgtgctgctgaggttaacttgtcaacagcctgcttatctcagcagtgtaaagttaacagcaacatggaaaagtttcttttatatattatgcaatggcatagagcaattcagtcacttcctttaaggttccaatgaagctgctctttaggaacgcttatttcaaactccctaaggtcaaaatccaggcaccacaagatgcagcatcagccactgaccaaaccctgtctgtgtgtggagatgacacacccagtcccagataatgtatccacaccagtgaagggtggagtcgttgattgtcagatcacacaaagtgactcagagcagggaagacagggcagtgaaacctgatcaggcacagtggctcacacctgtaatcccaccactttgctagtccaaagcgggtggatcacttgaggtcaggagttcaagacaagcctggtcaacatggtgaaaccctgtctctactaaaaatacaaaaactagctgggcatcgtggtgtgtgcctgtaatcccagctaatcaggatgctgaggcaggagaatggcttgagcctggagacagaggttacagtgaactgagatcacaccattgcactctccagcctagtcgacacagcgagactctgtctccagaagaaaaaaagaaagagttggatgcacctgaatccaacccctgcctcatccttctcccttgaaggccaaatacaccctgatacttttcaccaaagagtagaaacaacaccattcacttgaccccaaatgtgactttccacaggatgcaaacacagtgttggaatggccaatgacaatgacaatgaaaatgcaggctgagggtgatgaacaggacacactggagagcctgacatcggcctagactatgggggtgtcttgatgcttcacaaagagcccaaggagcaccccaaagaggacactggagcacaggcccaaagggtgttcacatgccaggaaggccactaattttgaaagtcagggacattggtgcctgcttgagtcctgatgctttatctataacatatgcttttctgcatctggttagacaaggaaatctgaaatttttgtttcagcatttagaaataagttatttaagcaatcctcacactcatggtttattctggaactaccttcagacacacagctacagatagggtatataatgagtatttccaaggctacactctgtaggaaaaaacttcatgaagtcagtgggaccctctcatgggagggttttaagacccacaatcaaaaaggtggggaaacattagagtggaaggagggcagcagaaggtcaaggactttcccggaggcctaacatacccaacattattaccctagatgaaaaccaaatacatatcctaacaccacatactctcttcaatgtttaacagacaaaatgaaatgtattcaaagctaagcttccagaattccactttacgctattaatgatgttttaatatccctcaatgtgttgatattaggacatttttaaatatgaataccattttctggttatatatggaaaatatcttgatttctgagatacaaaaatgctcatttttagatatacatggtcttgcactttttttataaaataaggtgaaaagacaggaaaaattttttcagatcatggaacttggattaataggagaagagtcatacaaatttatttaacatgtatatatgggagccttcagaatgaagacccacccaacaataagacaaaaaagcttatattaccattctgaggccaagaaagaatgcagacttggctggccaaaaaatcccgggtttggtgggtaagtcaggtttaatggcaagacagattagggaagaggaaaggaagaagcttacctcctgtgtagctaaggagaccttgttatgtagatgaaggctccctcatagagaataggtgggaaatgctgcttttcagacttttatttagacttttaagtaatagggacaggattatgctatgttgcccaggctgttatctaattctttttctcaagcaatcctcccagctcagtctccgaaagtgctaggattacaagcatgagccgccatacccagacagggtttgttcccttgtaaagaattatttgttgctggacacagtggctcacagaggccaaggaaggaggatcacttgagcccaggagctcaagacctgccatggcaacatgacaaaacctcttctctacaaaaaatacaaaaaattagctggatatggtggcacgtacctgtactcccagctatccaggaggctgaggcagaaggataacctgagcctgggagattgatgctgcagtgaactgtgattgcagcactgcactccggcctgggccacagagtgagagcccttctaaaaaaaaaaaaaatatatatatatatatatatatatttgttcacttattgcagcttcagatttttaaaattaattgtaaattgcattttcactacagctggaaaaataagaaaattttgcacagagccaagataaaaatagatgtcagaaataaatcattagtcttatatagcatttgtttcaaaaaaaaaattttttttttttgagacaaagtctcgctctctcacccaggctggaatgcattggtgtgatctcggggcattgcaacctctgcctcctgggttcaagtgattctcctgcctcagcctcctgagtagctgggatcacaggcacgtgccaccacacctggctaatttttgtatttttagtagagatggggtttcacgatattggccaagctggtctcgaactcctggccttgttatccacaagccttggcctcccaaagtgctgggattacaggcgtgagccaccgcacccagtctcaaaattcttaatttttttcttcttcagatgtggtgtagtacatttcttaagtctgtccttttttgtggatgatttctttatttctttttctttctttctttcctttttttttttttaagatagggtctggctttgttgcccagactgggatgaggtagcacaatctcagctcactgcaatctccatcttccaggcacaagctatcctcccacctcagcctccgtagtagctgagaccacaggcacacaccactacacccaaagtgctggtattacaagtttgagccacagtgcatggccatttttggatgatttgtaacagagtttcagggcatagcgttgagaatgctgattgggaaaagaaatagagaaaatcttttattacagcttgagaaaatgaataatcttccacaataaagtatagtagataaattggtgaattacaaagattcagcaaaataccagtcctcctttgcaggttggggaacttgtaatggtggataactcttcttcttcctgttatctgtggggtaagacctggctggcaactgttgtcatatgtttgtgttcacatatgattaatgtgtagtatgtgctttgttatcatggaaataataatgaaataatattgtgcaccttaataagataataagattcagagaatatgattaaatgctgagtttatctgagcacatagtttgaggatagccactggggaaacagatatcctgaagagtggggtcagtgctccaacacggggaatttgagtcttctcttctatagggcaaaatgaagcttaacagggtgacattttccatacaaggccggtgcacacatttcagtgatttgataggttgcagctaccaaatttcaaggatgattgctttaacttttttttttggatggagtcttgttcggtcgcccaggctggagtgcaatggcgcaatctcagctcactgcaacctccacctcccgggttcaagcaattctcctgcctcagactcctgagtagctgggattacaggcacgtgccaccatgcccggctaattttagtatttttagtaaagacggagttcaccatgttggtcaggctggtctcaaactcctgacctcatgatccgcctgcctcggcctcccaaagtgctgggattacaggtgtgagccactgcagccggcctgctttaactttttgtaaggaggggtagtggtctcaaaaggatcctacctctggcacttctctgtcttttctaatcatttacagcctaagaacaaggaagagaatctttttgacatgcacagggaaggagcaattacatagtagtgtaaacacatttctcaatatgtttattgactgaaagggttagatacttttattttccctgatgaggatgaaaggtaagtgccttataaattcctgcctgcctgtaaacataaactgagtttgagagattttgctggattcttcaaacagtgggtattttctcattgaaacagaggcctgagtccagggactgcaagctaaggccaatgacaagcctacaaagagaggtcattgaaagctcacaccaggcgcattggctcacacttataatcccagcactttgggaggccaaggtgggcaaatcatgtgaggtcgggagttcgagaccaatctggtcaacatgacgaaatcccatctctactaaaaatacaaaaattagccgggtgtattggctcacgcctgtaatcccatcccttaggaggctgaggcatgagaatcgcttgaactcgggaggcggaggttacagtgagctgagatcatgtcattgcattctagcctgggcgacagagctagactctgtctcaaaggaaaaaaaaaaaaaaaagaaagctcacttggttcttcccctgcaggtgccccagctactcacattgaccatgggaggagccctttatactgagagaatctgagatccttggaaagctagggatccacaggcagatacggtagtcagtgatgccctccacaagtgataatttttgtcatggggcttttcctagacatttgtagtgaaacaaatgtgagtttaggtaagaaataacttttaattctagaccttgaagccagcttgtcctgcgggttgagcacggtggctcacgcctgtaatcccagcactttgggaggcccaggcaggttgatgatgaggtcaagagattgaaaccatcctggccaacatggtgaagccctgtctgtactaaaaatacaaaatttagctgggtgtagtggcacatgcgtgtagtcccagctactcaggaggctaaggcaggagaatcgcttgaccatgggaggcggaggttgcagtcagccgagatcatgccactgcacttcagcctggtgacagagcaagactctgtatcaaagaaaaaaaataaagacgtcagcttgccattaggagaggtcataaaaggagtctaggtactgaacttgtaagtaaaaaaaaattttaaataaggccaggcccagtggctcacacctgtaatcccagcacttcaggaggctgaggcaggcaggtcaccccaggtcaggagttcaagaccatcctggccaacatggagaaaccctgtctctactgaaaatagaaaaattcgctgggtgtggtggcgggcgcctgtagtcccagctactcggaaggctgaggcacaagaatcgcttgaacccgggaggtggaggttgcaatgagccaagatcacgccattgtaatccagcctgggtggaagagctagacttcgtccccccgaaaaataaataaataaataaataaataaatggggttgtatataggcttagaatgggtcagtcagaaattcaggggccactggtcgtggtggctcatgcccataatctcagcacttggggaggctgaggtgggcagatcacttgaggtcagaagacaagtgtggccagcatgatgaaaacccatctctacgaaaagtataaaaattaactgggcatgatggcacacacctgtaaacccagctactctggcgactgaggcatgagaatcacttgaacaccagggaggcggaggttgcagtgagccaagatcatgctactgcactccagcctgggctacagaacaagactgtctcaaaaaaagaaaaaagttcagggacctggaggtaggagagaaactgaagcatgctttggttaatagatatttcgttctgactgatcactaaagacaaagctattcacctaatggtttgtgaggtaaatactggaatgtctaatctgtatctggtttgtcataggtaacaaacgtggcacaatctaagtcataatgcgaagggtgtttcattgcagtaaggtgctcttgcacaacacaaagggtgggggattctttttttttttcttctttttttttgagacagagtctcgctctgttgcccagggtggagtagagtggcgcagtctcggctcactgcaacctctgcctcccaggttcaaacgattctccttgctcagcctcctgagtagctgggactacaggcacatgccacctcaccctgctcatttttgtgtgtgtttttagtagtgacggagtttcaccgtgttgatcaggctggtctcaaagtcctgacctcaagtgatccacctgcctcagcctcccgaagttctaggattacaggcattagccattgcacctggccacatttaagaattttattttatgatttgggtgttaggattttaattagctggttggaaacttagtgaatagtttgataatgtttgaagaaggaaaatgagttcttgaaataagctgttttatgccaagtcaaaataataaaaatatgaatactcagacacataccaccccaaaaaataaataggccttgggcatttctggtgtgtctcacttatttttgatacgcaaaggtgaccaaagttttgattcttttcgttattctttgtagctttgtcatctctttgtcacaaagcagaattttgccacttttgaatttttagtaacagaatattaccattaatacaccattagtattatgctgagagggtgtctttctggttttcttgcctgagcctgttgcaaacatgctgctccgtgaagttgtgggtcacgtaattgacttgcccattccactacttaatggcacttgagttggttcaagtttatcttttgatcttattgacaatgctcttcttgtttttattcctaattggaaatacaacagaaatttttacacattgggaaacaattgctgggttgtagattatggataaattcaaatttactaggaaatgtggatagagtatgaatgtaacttatgagttaaccatctcacctttcatgcatgtgtctttattcttgtgatttgccaacactttgaattatctaactcactttttgttgcccgtctactcttagacagaatttctgtgtttctttttgctttttacttgctgccgttggttgagcatttttcttatatgatctttcatcttctgtgtagcagattccagtcatcctcttacatttgactaatttgtagggtttttttttccttttttctttttttttaatttgagacagtcttgctctgtagcccagatggagtgcagtggtcactcactgctcactgtagcatcaggctcgtgggcttgagcaatcctcccacctcagctttctgcccagttaattttaaaaaatttttttgtggagacagggatctcactgttttgcccaggctgctctcgaactcctgggctcaatcaattctcctgcctcggcctcccaaagtgctgggattgcaaataggagccaccacactcagcaatgagggtttttttttttgttttaaacaagatatccgtacatgtttctgaccaatattttatttaaaatctttaagaactacatattaacaaaggttattctgtttttcattttctgttttccattttcattatgactacttgtttttctttcttattctcatttttttcctagatcattacaataattttccatgtagtggccctggcatgcattttgatccttcatgcaatcatacagctacctcgatgtccattctctctgccattctgaaattggacctcactcctttttgactctagctctccatctgctatgtgataaagtcctgtcttgtgatggttactatgggactgaatgaagaagggcagatgcagaaataaagacaaaagatctatgttaaagaagggatcagggggctccttgcttctagtgagcaagggccctgagcttctatagccctttgtttttattgggtagaaagagcagggaggaggaggtaatggttggtcagctgcttgatttatcacaggttcacatgattactttctttgtacaacaggcttcagatgtgcctgtagataatcacaagaaacactgcgcttggggagtaactgccctcagcattctttctgggtggcagacgtagtttgtcagtttgccaacaagctgcattcatgagaagagtttgctgtttgctcattagcctccagtggtatactgagttgatcaggacccccattctttcagcctccaacactgtctgattacattgtttccaaagcctcttttatggacttctgtttaccccttggcgtgtcctgcatttactctcctcaaaatgtgtacttagaggccgggtgcggtggttcatgcctgtaatcccagtactttgggaggccaaggcaggaggatcccttgagcccaggagtttaaaaccagcctgggccacactgggagaccctgtctctaaaataaaatgtatacttacaagccctaaaccccaacagggtcatatttggacacagaccttttaggagatcacatacatttataaaggagagccctcataatgggattagtaagaagagagagaattctctgtttctccagcatgggaggacaaagcaagaaggcatctagctgtaagccaggaagatagccttcactgggaacaaaattgctggcagcaagattttggacttcccgcactccagaattgtgagaaacaaatgtttgccgtttaagaaactgagtccatggtatgagtccatggtattttgttataccagcctgagctaagtcaccccaagagtcctcacattaaccatatactgtcgtacaagtgctgcatttggatctacctggaatgtctccaagtcttctacttttcctcttggacccattgtgagaataggttttgcttcataggcaactgctggtgatagtagtgatagcccataacaactagggagttaaagaaacttcctttctctctctctctctctctgtttttgaaatggagtttttgctcttgttgcccaggctggagtgcaatggcacgatatcgggtcactgcaacttctgcctcctgggttcaagtgattctcctgcgtcagcctcccgagtagcttggattacaggtgtgcaccaccacgcctggataattttcgttttgttagttacagacggggtttcaccatgttggccagcttggtctcgaactcttgacctcaggtgatccacctgccttggcctcccaaagcgctaagattacaggtgtgaaccactgtgctcggcctcttttatatgtgtgtgtatatatatatattctcttttttaataaaagtaaatagaaactaggtcttactatgttgcccagggtggtcatagcccaagattttgggctcaagcgatctacccgcctcgctcacccaaagtgctgagattaaggcgtgagaaactgtgccaggccaaatgaaagaaacttagtgggaggcctggcacagtggctcacacctgtaatcccagcactttgggaggctgaggcgggtggatcacttgagctcaggagttcaagaccagcctggacagcatgttgaaaccctgtctttactaaaaatacaaaaaattagccgagcatggtaatcccattctcacagtcatagaaaggttcttttttaaggattctacctacttgagagcatcatatactgccagcacttgttcacttcaagagtgtctggtttcatctctatgacataattacaaccaaaatcctaaaggaactgatttaccacactgtgtttgccataaggcccaatttgtacctgcagcagcagctgtatcatcccaactcacagctctaccctctaaaggtgtgcctgaggcttgtgatccagtccatagggaaatatcactacctgctgtgttttataattggaccatccaagggttgtcagggttttcccagagagttttgtgggatttttttttttttttgagaccaggtcttgctgaagttagtatggcagcatactaacacattaacctgtcgaaagcttcctgcagagctgtgtcccagtctcaaagtgcccctttctaataattctatatattggtatcaaactttgggctaagtgtcagataaatgctctccaataatccaaagaccaacaaatgtctggatttcttttttcttttttgttttttaagagacatagtgtggttctgtttcccaggctggagtgcagtggtgggatcatatagctcactgcagaaactcctgggatcaagggatcctcctgcctcagcctcccaagtagcagggaataaaggcacatgccaccatgcccaattgtttataaatttttttgtacagatggagtctcactgtattttccaggctgttcttgaacgcccaggctcaagtgattccccaacctcagcctcccaaagtgctgagattacagtcatgaaccaatgcacccagccctgaaaaggaaatatttcgaatggaaattcaaagggagaacatctaatgttcaagttgatgtctatagagcagttaacgggaactatcatttagggtctgtgggattctaggacactaggtatgaaacaaatatgaggaaggtcagagaacaagctgacttaatgattaatgctgaaggtgctgccagcttggtttaagttttcctcctcccttcctccctgatgaatttgataaagtttaaagggatggtttcaccaggggccttttacattgacagcaaggaggtcatccgcctggtaaatcctcagtagtccaagcctcttacatggctagaatgatccagtccataaggaaacgtcaccaccctctgtgttttacaattagaccatccaagggggtcagggtttccccagggaatttggtgggatttttttttttttgagaccgtgtcttgctgaagtacagtagcctgatcaaagctcacagcagcctcaaactttggggctcgagtaatcctcctgcctcaggctcctgagtagctgagactaagggtacacaccacctctccaggctaataaaaaaaaaattatggagatgggagtgtctcacttcactgctcagggtggtcttcaacttcgggcttcaagtgatcctcccactttggcctcctaaaatgttgggattgcaggtgtaagccatggcacccggcctcccaggctgttgttgaaaggtctttgcaatctctaagagttctgcagcagtttattccctgacagtgagagtctcatcctttcaccccattttgcagcagtagttgggtgttcacttttctttccataaggaagcgagcttgccagtgaccctcatccccctcctcatcgatgacttctttgtcatcagagccttcctcttcataaattcccacggaatccaagttttcacgtcccaaattatgatagccacaggccctcaccagctgccatagcaccccatttcatggaagccacctgactcttctttgagcatcctgtcccaggagcccccatctgtgctctcccgggctccaggccctagagccgcgctgctgcagagcccagttcccagggctgctccctccacgtatccacatccatctccagctttccaccctttctctgaccagacaggcctggaggtgctgcagtgtcagtgaccgtgggtccctccgctgccacctccaccgcgatctggaagtcttttaaatgtacttaagttatcttagaattttccttccccactttatacataaacataggaggagagcagggactctgctggtgtcttattcacacaatgggattgagggtgtttgtgtcatggaactgatcaatggggtgagaagtagctgaataacctgcaggggcagcagagcccgaggccagtgactccacgctgaggccagtctggagcctgcaaaggaagggaaaggagcttttcctgggggcttcctgggcagcccgccctcccctacaggtggcctccagctgctcagagcagctccagaaggagtgtggattccgagaagctgtagggccctggaaagcagaagaccttcgtgcagacgcatttgtggggttctgtcctttctggtgttgtacctctggagcctggggctgtcttctgggcagggtttggggtttgacatacatggggtcgctggagtcagagttatttgtatatataaagaaaatgtgtgaaaatcaggctagagacacaattgtttggtggcgtcacctggataaaaggtttatgaggttgacagtttatttaggtccgaagcttaaccccaggtgagagtttcctgcaggtgaaaatgaagatctggaaggacggagcattttcatactgtgaggaggggatgggggtgtgtgagcaagtcttggccatgcctcatccccaattccggcccgctcgaggaaatatgcctctcctcctggtgcagtcttgcctggcctggtctcggttcccctgctgctctgaggcaggagatggctcctgtggacactgagtctgaaattccctgcacactcctgtgaccccgtgcagaacgaaggagcggggacagtcctttgagtgaggaagacgctagtgttctcttctaacaatagcaagtttggctgaaatgcaactatccaataacccgagtgcaggaagcagctcgtgtaagcttagagaagctgttgctagaatctgtcagtctggctccgcagggcctgatacccagggcttccgctgtcacttagacgtggggggcggggccgaacattccatccaatcagaggcactggctcggggccctgcccactgtgcatccaggcacggaggatgttgcattcctgccgtcacctttgtcgctgcgagggcggcggttgggatctggcctttccagccccgagagggacctagtgcctctacccagatttctgtcgctctgtcacctgcgctatgccctgctttactcacaggagctgtagagaggaccccggtacatctgaaagccgggaaatggtgcgtgtgctggccgggagtggtgcgatgggggaggggctgcctggaactggcgggacccgggcctccctgtgggcgactccggggtctgggaccgagtcctcctagagctgctcggccctcggtccccgcggccgctggatgtgggtgggccggcagccgggactccgggcgtcctgtcccgtccctgcccgtcgactgcggccttggccccgaagcccttttgtgcagctccgcgcccgcagcccgacgccccagcttgtgcgggggccacgggagggtcatgcgcggatttcgactcgggtgtggatttcgtccgtaggaggagcagcggtctgtggggcccacagcctccactttctcctgttaaaaattatactgaggtacgttaacaaaaagttcatttgaggaaacagccattcacgaatgagaaacacccggtcctggcttgtggtttgtcaacggaaaaaaaacagactatgtaaaatacagaagtgtattcagagccgagtaggagagaccttggccgagggaaacacaaccccaagcagcctggagtaagtggtccggaggcggctcaggacagtttggttttattcatttcagagagacaggaattgcagggaaaatgatggatcaaggctggaaggtgtaaattccattggcagaaagggtgggacctgtggaaggggggttaggaggcacaggtggttgagggattctgtaggtggcagctggttgagagtgtgaagctttgtctaaagtttggaggaggtaggaaggaatgctgaaggaagggggtctgttatctgccacttcattccatcccagccaaaaaacagtcctgtttctctagattttatgaattctaagacgtaactttacctttgccttgcgtggccttaggtcttgtttgtaatttggtatcttgttgccacaaggagtctgtttttccagtcagagaatgtctgtttttacatgaatgtgcgtcagttgctgcatgtaaactcctaaagggagagggtataaggagacctgtctcacctcccatcctgtcatacagaggcactcaattttcagggtgttttgggggttcccttggccaagagccagtcacttcacttagctgggaaggtactttgtttgtttttgtttttgtttgagacggagtctccttctgtcgcccaggctggtgtgcaatggctcgatctcggctcactgcaacctctgccttctgggttcaagggattctcctgcctcagcctcctgagtagctgggattacaggcacgcaccaccacccccagctaattgttgtatttttagtagagatggggtttcaccatgttggccaggctgttctcaaactcctgacctcaagtgatccacccccctcggcctcccaaagtgctgggattacagatgtgagccacatcgccatgccagaagatatgtttttatttttgttttacatgtttaaggctaggcttttataaggtacatgaggagacaaaccagataaatgcttgattggttgcagagatgcagtcgccttatttggacttgtcaaccggaaataatcaaaaggttcagatttcagttggaagagtttattcaagcagaaagatagcaatgaccaaaacacagactccagaaaaatggactcagtactccaaaattggaagttatgttcttgcttatattactgaaaaaagaggtcctgatcagaccccaagagagttcttggatctcacacaggaaggaattcaagacgagtcacaaagtgcagtgcgaagagagtttattgaaagctactctgggccagcatgatggcttaggcctgtaatccaagcactttgggaggcccaggcgagaggatcacttgagctcaggagttcgagaccagcctgggcaacttagcgaaaccccgtctcttccaaaaataagaaaaattagccggatgtggtggcctgtgcctgtagtctcagttactcaggaggctgaggtgggacaatcacttgaacctgggaggcagaggttgcagcccagccgaggatgcgccactgcactccagcctgggtaacagagtgagaccccatctcaaaaaacaaaaacaaaacaaacaaacaaaaaagagttgaagaccaacctggccaacacagcgagaccctgtctctatttaaaaaaataaaaaagaagaagaagaagaaagaaagcttctctgttacagagtagggcatcctcatacagcaagaggaggaatgtactgtcttaagtttttcttatgtagggatcttgtctatgtaaagaataaactaagctgtgcctacctgcatgtgggctgacagcatcacaaaatttattactctgttgatttaaagaaaactatcctttacattttagtgcacaagtgcattaaagcataactataattaccttgaaagcacatattatgggtattggggtattgggacatcgggacattctgtcgttgtgggagtgtaaggatacttgcaggcatcttcaggctgttttcttcatgggaaacattttatgactatgggttgtgactggcaaggagtgtttcttgttagtctcaagatggagctggttggtctttctctggctcccctaggcacctgcttccctaacacttatatagggaaacggcaaataaatataataggattacattttccatagaaggctgatgtatgaggtacaataatttaatttttttttttttttgaggcaatgtcttgctctgtggcccaggctggagcagtggtgccatcacggcttactgcagccttgacttccccatcttgagcacctccgcctcccaagtagctgagactatagtcgcccactaccacacctgggtaatttttaattttttatggaggtggggtctcgatacattgcccaggcttgtctctagctcctggcctcaaacagtcctccttctttggcctccacaagtcttgggattgcaggcgttagccagtgcacctggctaacaacttaatttgttatcgtttgcttttttcccccagagcttgttttcttttctttctagctggtttttatttccttttcaatttaaaagagtgaattcaacattccaactgaagacaatgtgatagccatgaagtctttgtgtgagaaagttaagagggaagttagtctactacagagatcagtagtgaagaggggcccagtgggatggctcacacctgtaaccccagcactttgggaggctgaggcaggtggatggcttgatctcaggagttcaagcctgggcaacatagtgagaccccccatctcaattgtgaaaaatcatattaaataaattaaaaatagcaaagagggaaagggtctttcctgtttcccttcagtcatttacaacattttataaaacagtataggtaagaaggaaggcgaatctgtaatcaaggaaagaggtgttccagctggctatttgaaagctgtgtgtcatgtgactcaaccccatgatcacattgcttcaagacagtttagagatgcaccagcttaaatatttgaattacttggttgtttttgtttgtttgtttgtcttgagacggggtctcactctgtcgtctaggctggagtgcagtggtgcaatctcagctcactgcagcctccacctcctaggttcaagtaattctcctgccttagcctcccaagtagctgggattacaggtacatgccaccatactcggctaatttttgtatttttagtaaagacagggttttatcacattggccaggctggtctccaactcctgtcctcaagtggtccacccaccttggcctcccaaagtggcgggattacaggtgtgagccaccatggctggcctgacttacttcttccaacagcctatataggtagaaaatttctagttatgtaatcagaggttaattggtggactgtgcctgattaagcataaatttcatttttctataaattagtaattttatttatttattttttttgagacgaagtttcactcttgttgcccagggtggtgtgcagtggtgcaatctcggctcactgcaacccctgccttccagtttcaagcgattctcctgcctcagcctcctgagaagctgggattacaggcgcctgccaccacgcctggctaatttttgtatttttagtagagacttggtttcaccatgttggccaggctggtctcgaactcttgacctcgtgatccacctgccttggactctcaaaagtgctgggattacaggtgtgagccaccacgcctggcctaaattagtaattttcaagagttgtatttcaatttgatttcagggtcgttaggtaccacggaccctactggattgaacaaaggaggacgaatgcgggaataaagacaaaggcaaaagaatatgtttggaacaaggggtcagggggcttcttgcttgtagtgaacgtgggccccgagcttctagcacccttcatgtttactgagtaaaggggatagagagaagcgggtggttgtaggtcagctacttgatttagagcaggcctgcatgactgcatttttcaaacaataggctccagatgtcccagtagataacctcaagcagcacagcaccagggagtgattgtcctcagtataccttctggcagcagaagcagatgtgagtttgcccacattctgcattcatgataaacagttcactgtttatcatatagccttcagtggaaagctgagttggtcacaacctttgggccttgggctcccaacatctctccctttctgtttatgcattaattgaatgaatgtaaggccaggttgggcagctctcattttctgattggcggtccatctgattttacagactatgaacaaaaaacagagactaaacaacatcattccaataactatatatgagatgttaatatagtgctttagattggtccaaatattgaggctctctaggccttgcaggaattcactccagacttctaaggaaggctgaaactcttgagtttgcttatttaagtcaagaattttgttttgcagttcaccaatatcaaaggtcccgtggatgctcactttggttgtattctaagttgtttacacaaatatgagtggcattaagatgacagcacaattgctgttgcaattgtaagctttgtgcttgttcccctaaccatagaactatggatttcaacattgccacttcagtttgtaactcagtgttaattctattatgaagtagccacacttggttggctgtatgcatccagttctgcacgtactgaactgtttgaatagaactatgcaaagtgatggagtacatcacaacagaagtttttggtgtgaccaaggaaacaatagccaaaattatcatgcctaaggctctacgggcacgatgagtaagctgagttagaagaagtttcacaaagtgcaaagcaggggtggcagcccaaggcttggacagattaatgggaatccatagcccagggatgcaacccaaaatcatcaaagtagagatattatgtgtttgtggccaggcacagtggctcacgcctgtaatcccagcactttgggaggccaaggcaggtggattacaaggtcaggagttcgagaccagcctggccaacatggtgaaaccccgtctctactaaaaatacaaaaattagccaggcatggtggcgggcacctgtaatcccagctactcaggaggctgaggcaggagaattgcttgaacccaggaggcagaggttgcagtgagccgagatcgtgccaccgcactcaagcttggcaacagagcaaggctctgtctcaaaaaaaaaaaagagatattatgtatttgcaatgtgctatgattaatgtagtgatataactgacaagatttacaggtcaattgggtattgtttacctggagctaatccttcttagctgccaaaaagacataaggattaaaaacacaaaccgtaaactgagtggtgatattctttacaagtgtagcattaaaactgtgttgcttactattgctattattggatagtatcccaaccccgatgctgccattcataaatgaaggtgctgccttccataacgtcttttggattggtccttgcctgcctggataatgccactgaggaagaggtgagctaaagcctgctccacaccaagcaatctgggcagcagactgggattggatcccggtgtggtataaagaagaagtattaaaagcttaccaccaatgccagccaagtttgtgccatgatttctaattttcatcttttccatgtagttgacctttaggtccccaatccacaatgtctgcagttaacatagattgttttctatgggccaagactctgggtccatggaggggggtaggaactatggaagggaatccattccatatagtcagcacaggtggggcgactgggccgggaatggttggttagcacaccagttacattaatggaaccaaaacataataagtacatgacttttccatagtgattccaccatgcttgagcttgaattataagacagctactgttgagtgacatctctgtggtgatacacaaagggagtccttctagtggggtggtataattgatgacattgttctaagagtctaactgttctatgccatggggagttaggggtcctggagcccacggtccctgatcatgatagatttcagaaagagcgtcactccaaagtataggccgtactgctgggggattgggaacatatgcccaatatgtttttacctctgtacagggaaaacatactgcacaggacattatggctgacaggccaagaacatggcatcaggggtttttgcctgtccctgacgctccagtagtttctcagcttcttgcatggttttcttgagttgtccccaggttatgggggttgatgtcgttgtgactccggtcagccttctctccgtcttcacactcaggctcagctggctcatgggttgtaccggagggaccaagcccattgttggccaccatgggtccctccagtttcccgttccatggtggcacgcaccttgagggcactcacatggtgtgtccatctcctgtagaaacacaagcataccttcatccccatgtcagtaaatccaccggacctttccattgtccttcttccagggatttccataacactttcagataaactttcctcttttcctctaacacttgccaatgtctttctgctggagtcttaccatccagaccaggagtcaaacaatttaaagtaaataaggctaaatgtaattttatttgaggtggtagctggtctcctataccccctttctgttttttcaacatgcattgtaatgtttgatgtgcccactctataatgccttgtcctcagggattgtaaggtattcctgttttgtgggtgattgcccataactgtaaaaagttttgaaaaacatggctaagtataagcaggtccattgtccgtttttaattgtttagggatccccatatgagcaaatgatgaccgacaatgtcaccgcacatgagcagctgtctcgcctgtttggcatgtagaatgcagcatatgagattaagtgtctatagttacatgaacatagctaagcttgccaaaggctgctatatgtgtaacatccatctgccaaatttcatttggagccaagccttgtggattgcatccttccacaggtataacaccagggacatgctgacaagtgggacaggcttgcgccatagttcgagcctggctgtgaggcaggtgaaacatacgagtaagggcgaggtgttttgaggcagtattgcctgagaagtttgagcttgttgaaatacagaacaaaccagtttatctgctctatcattacctagagatagtggtccagggagttgtatgtgagagcaaatatgagaaatatgtaaaggagcagcatgagagcgaacagcttgttgaagtcttagaaacaagctaagcagttctggctctagtgtgcttttaattgtagcagtttctatgcgactggctacatttacgacataggctgaatcacagacaatgttaatgggagttgaagctgtgagctctaaaactagaatgactgtaattaactctgagcgttgagctgaaagtccagagatccttattgtctgagtatgtttaggtcccaacatagctgcacgccctttggaagagccatcggtaaaataggcctgaccacctggaataggctcgtgatgagtaatcacagggaagataaaataatagacattataaaattgtaaaactttgtccgatggagagtggttgtctattatttccacaaaatctgcaagagcaatttgctacacagtcgatatttcccatgctgtggcctgttgttgggaatccaaggaaacaataattgcgtctggatcataccccataagcacttttaatttatgcctacctatagtcacaagttgtgtaattaaaggaagataggcttgcaaggttttaactgtttgattaggtagaaagagccattctattactgatacagacttgtctaagcactggcccaggagtcctgttggagaatgaggggtatgaagaataagcaaaggcttttgcggctacagccatgaggcatgtctctgctgaagcatctgttctacaagttgcaactcagcttctgcctctttggtcaattgctgcggggaaatctaatgaagaatctccttgcagggtttgataaagatgtttgagtcgataagttgcaatacctagcattgcgcacagccaatgaatatcccctaacaactgttgaaaatcatttaaaatctgtaacctgtctttatggagaactactttctgaggccgaacacttctttcagtaacaatagtgcctaagtaatggtatggggaagttgcttgtactttctctggaccaattttgagattccatttagtcaaagcctgcttcctttctctgaataactgatgtaagatttgatctgtaggagtggccaaaagaatgtcatccatgaaatgaatgatgtgagcagtaggaaacatattcagagtctccttcaatgtttgtcctacaaaatgctgacagcgtaggactgtaaagcatgtcttggggtaaaactttcctttgataaagagaaacaggttctcttggatgaatagaaggcacagagaaggcagatccaggcttatccttctcgtgtaagggtatagtaaagaaaggtctatgccgggcgcaatggctcacgcctgtaatcccagcactttgggaggccgaggtgggtggatcatgaggtcaggagatcaagaccatcctgcctaacatggtgaaaccccgtctttactaaaaatacaaaaaaaaaaaaaattagccaggcatggtggcaggcacctgtagtcccagctacttgggaggctgaaacaggagaatggcgtgaacccggaaggcggagcttgcagtgagccgagatcgcaccactgcactccagcctgggcgacagagcgagactccatctcggaaaaaaaaaaaaaaaagggggtctattgctacaagaggccagtctctaggaatgacggctgcagatggcaagccttgttgtaatgcacccatcagtttaatttgtgcattaatagctctcaaatcatgcagcagtcgccatcttcctgacttctttggaattacaaacactggtgaattccagtggctaaccgactcctctttatggcctgcatccagttgctctttttctactgctgaagttgagttagtttctcctgtgataggggccattgatccacccacacaggtttgtcactgagccattctaatggtaaggcagtaggtgaaggagaagtatcaatgacccccatcagaaatcctgactcctagcccttttctatctgtttgcccacttattgatataggatcagggtttccctgtagggacttttctaagccttttctgctctgatatcccattttagggtttgacccttggctctttttagatttgtcaactactaaattagccattgcttgacctaacattgtagaatgataaagctcagttcctacatcctgagaagctctgagaaaatttcccaactcttctgtatacttcacaggtgctagtgcacatttacaatctacgtttgcattctcaaaagctaaagttacggtttgcatctctgcagccatggtatgaggaatctgtttcttcactgcctcttgtaatctttcaagaaaatgtgcacagggctcctgcaacccttgcgtgatatgtaaaaaggattgtactggaaccccttcctctggaattgtggcccaggcacatttagcagccagtgcacactgcttataagcagcgtctgggagtgccatttgatgttccaggtctgaataagggccattacccaacagcatatcctctgtaatgtctctatgtccagtagcatgattctgtctagcctggtctgcacacatttcttcccaatttaaattccgtgttaggtatgcgctagcagacaaacaaatctgagccaaatgctttacatcaaagggtataaggcgcatagcaccaaaaagagattctggtaatcctaaagtaaatgggctctgtactccattattaactacactagcttttaattccttcaacaacttaaactctagtgggggtgtgttcatgaataaactgctgtggattatttgaatcgggccttatggaaataggaaaaacgcaaggtcctaagggctctccagctatggcagcagagcataaagttgtttgttttggggtctctatttctgctaccgaaggaggcagtacagatgtttctgctattggagggggcggtataggccaatttttatcctccttctcctgtttattattttcagttggtactgtgggtgggacaaaagattctttcagatttttagactcagaatatgattccagctgtctagcagaataagaaggagataacggcagaaggacagtatggactaaactccaagtggagaaaacagaaggatcaacttttagacctttttgatgagcccattttaatccttcacctgctgtgtcccaattttccacatcgaaagtgcctgtctgcagaaaccatgggttatgcataataacctcctgcagcatcttagtgtctgagaactaacctgagcaccagactgtttaagtaaaactttaagcaactgcacataatgttgctcctcaatcccagcactttgggaggccgaggcgggtggatcatgaggtcaggagatcaagaccatcctgcctaacatggtgaaaccccgtctttactaaaaatacaaaaaaaaattgtctcttgctcctcaatagacaaatactgccccatgttaccctgattcagaaacttcctgttcccagtacttctttagagcacctaccttatattgctcccagtacctctttagggcactgatcagtatctctttagggcactgactttatatcagctgccggcagatatcctggggtccccatttgtgtggtgaatttcatttcctctgctccagcaagctttcttcgttcacatcctcaagtccctgttcacggccgccgctttgccatgaaccctactatactgaacaaaggaggacgaacgcgggaataaagacaaagacaaaagaatatgtttggaagaaggggtcgggggcaccttgcttctagtgaacaagggccctgagcttctagtgcccttcgtatttattgattaaaggagatagaagggggtggttgtaggtcagctgcttgatttagagcaggcctgcatgactgcattctttgaacaataggctccagatgtcccagtagataacctcaagcagcacagcgccagggtgattgtcctcagtgtaccttctggcggcaggtgcagacacgagtttgcccacattctgcattgatgataaacagtttactgtatgatcatataacctccagtggaatgctgagttggtcacgaccctcaagtctttggctcccaacccttaggtaggaccttaggacactacacacggttcggcctcattgcttcttatttaaatttgttcatactctccagggtgactggtttgtccctgcattctccaaatatacgggatgcagggcctcaaatcctccaccctcataccacagcctaactcttcaagggcttgcagtgaaatctgtgtctgaacatttcacatgagaggaaagcagagaataaccactagacatttgcctgaaaaatcctttctgcctctcctcctcttatctttccgagacacagacaccttatcaggatgtctttgggatgcggttcctttctggaaactgtacagggtgatgtgtcttcagtacaccctcctatcttttcctggttttgggttttagaactgcctcgggctgactcaagttccccacaactgccatgtctcctggagggtctagtgggtatcagtgcctaggggagtggggcctcccaagggagcagctgaatgccttatggtggcagagatgcctggtatacgcttcatctagataaccaattctctgagttctcagcttctccctcccaactccagtttccattaattggagacacatggctggtcagccaattggatgttgctattgagggaaaacagaaatgattcctgtcttctggattttctcaactgtgaagagagaaatatcccaaaagaagaggaaaggccacttcaacagggtggaacaatagcctgcaaaagcaaaatatacctgggggtacacaggggacacaatgccatgttggtgggaaatcgtcattgagcgcttctcctttcctctatgtgaaatgttcagggaatcaccaccagtcactctcccgtaaaagtatgtgtgctgctcctcctttcatctatcctggaaacagacatcagattgtcttttggttgaggctcccctttggaaacataaaggagtattgtgtctttagtgcactctcctatcttttcttggtcctgggtggcagaaatggggtgacttgcttctttcatgtaaaaatatgcattgaaggtctcgcaataactttgttgcttgacaactcatttagtttttatttttatttatttatctaaaaaatttttttgttttgttagagacagggtcacaaactcccaagctcaggtgatcctcctgcctcagcttcccaaagtgctgggattccacttgtgagccaccatgtccggccactcatttttttgcatcactgagtaacattccattgtacggatgttaccatagtttgtttctttattcatctattgaaaggctcatcttgagcctggtgtgatgcctcatccctgaattcccagctacatgggagactgaggtgagaagattgcttgaggccagcagttagagaccagcctggtagatacagtgtgagaactcctctatttttttttttttaagactcaccttgtttgattctaattttggcagttatgagtaaggctgctaaaaatgtttgtgggaggacttttgtgtggacatcagttttcagttcacttgggtcaatatgtaggaatgagactactgaatccataagaccgtgcttattttcttcagaactccacagactgtctttcaaattggctgtagaattttccattcacatccctagtgaatgagagttcactgtcaccagcatttggaagtatcagtgttttggatttcatctaccgcaacaggtatttactgttacctcattgttgttttctgttgtttttttttttcttcttttggagacggagttttgctctttttgcccaggctggaatgcaatggcgtgatctcagctcactgcagcttctgcctccccagttccagtgattcttctgcctcagcctcccaagtagctgggattacaggcatgtaccgccatgcccagccaatttttgtattattagtagagatgagattttaccttgttggtcacgctggtctcaaactcctgacctcaggtgatccacctgcctcggcctcccaaactgttggattatagacatgagccatcgtgcccagcctgttttcatttgctctttaataacatgtaatgtagagcatcctgtcatatgtttgtttgccataattatgttctttagagagaggtatgcttggaaagattttgctttttttttttttttttttttgagttgtagtctggctctctggcccaggctggagtgccgtggcacagtctcggctcagctcactgcaacctctgcctcccaggatcaagtgattctcctgcctcagcctcccgagtagctgggattacaggctcatgccaccacgcccagctaatttttgtatttttagtagaggcggggtttcaccatgttagccaggttggtctcaacctcctgacctcagtgatctaccctcctcagcctcccaaagtgctgggattacaagcatgagccaccatgcccggcctttttattttttgattagttggcttttttcttatagaattctaggagttcttcatatcttttgggtaccagtccttgatcagataggtgtcctgcaaatattgtgtcccagtctgccacctgtctttttattctcttaacagactcttttcccaaacagagttttattttgaatgaagtccaatttatcgattttctcactcacagatcatgttttttgtgttgtgtgtgaaacctgattgccaaatccaaggttgtcttggttttcacaagtgttaagttctagaagttgtgagttttgcattttccatttaagtaaatgattcatcaggaggtagttttgtaaaaggttcagttctgtgtctaattcatttctttgcatttgctaatccaggtgtttcagtaccatttgttttgtgccaccatgtctaattatttattttattatggatacagggtctcactatgttgcccaggctggtctcgaactgcggggctcaaatgatctgtccgccttgacctccggttttgcatttttaatacttgtctttatagtagatttttctatgttcctagtgcctctcttgcgatcatatggaatcttctcttgtatatttagtttattaagtgtttttaatcatgaggagatatcaacccatttatgctagaggttgcaattttttgaattgcagacgtgtgaaaaatcagactttggtaatgaccttgagcagtaggatacaaataactcccacatgcttagcgttccagaaatggaacagtgggctcaaatgggttaaggcttgtcacatgccttttctgcctctattaggacattcttctcattttttgtttgatttgagatggagtctcactctgtcgcccaggctagagtgcaatggtgggattttggctcactgcaacctctgcctcccgggttcaaaggattctcccacctcagccttccaagtaacagagaatacaggcactcgctgcacgcctggctaatttttgtgtttttagtagagatggagttccaccatgttagccaggctggtctcacactgctgacctcaagtgaaccacctaccttggcctcctaaagtgctgggattgcaggcataagccaacacgcctggctgctaccgtgatttgttatcaatacttactataaaacaaaacttaaaaattatcagcttaaggaattttacatgtacaattgagataggttgacaaatctatgtaagttctctaagatgaattctgttgtattttgccttttgcaattatcctgatgtttcatatatgtcgtagtatgggccaagatattgttttctttctttcttttttttttttgagatgcagtttcactcttgttgcccaggctggagtgcaatggcacaatattgactgaccccaacctcaagcaattttcctgcctcagcctcctgagtagctgggattacaggcatgcgccaccatgcccggctaattttgtatttttagtagagacaaggtttctctatgttggtcacactggtcttgaactcccaacctcaggtgatctgcccgcctccacctcccaaagtgctgggattacaggcatgagccaccgcaccaggccaagatgttattttctaagactaaataatattccattgtatgtatatgcttaccacattttgtttatccattcagccatcaatggatatgtgggtggctgcattgctcattactgccaccccaggaaggtcgtatagtggttaaatctgtgctcattacacctgggtatctcttaggagtttcttgtttgccctcttgtgtaattacggtcttgtttttttcagtaatgtcctgtttgcccttcttatcagcatctatctagctacattctgacaggataactgcaaactgaatgattcctgggcatcataatggatgtttctttctacttaggtgtctcccctcctctctgcttatatctagcatgcctgttttgggtggtccctggggttgtgggatttcccaggggctacccttcctgctcttggctagatatctgccttctctaacaatgtcatcaaagattacactttgggaacaggcattttcaaggatacacagcttcaggactgctaatgttaacttttttctgcatattaattcatagtactctgttatgacaggtgctacagacccacagtccaaggagacattagggacagcccaagcagctgacagagcgatacactatcacaaaaaaaaaaaaaaaaaaaaaaaaaaaattgctgtctgggtgtggtggctcatgcctgtaatcctagcactttgtgactctgaggcaggtggatcacctgaggttgggagttcgagaccagcctgaccaacatggagaaaccctgtctctactaaaaatacaaaattagccgggtatgctggtgcatgcctgtaatcccagctactcgggaggctgaggcagaagaagcacttgaaccccggcagtgagccgagattgcaccattgtactccagcctgggcaataagagtgaaattctgtctcaaaaaaataaaaaaaaaaattgctttatggaagaaagtaagtatagacagagagaaagggatctgatgaccaaagcagggaataaatgtttggagtccacggcatcctgagaacttcttgggaatagagtctaggcccccaatgctgtcactctcacccatcctcctctacacatgtgagatgtttcaggacccagtggcttttaaggatgtggctgtgaacttcacccaggaggagtgggctttgctggatatttcccagaagaatctctacagggaagtgatgctggaaactttctggaacctgacctctataggtaaggatgacaatattccttccctcagtgcattagtttaccaatgtttctagctcaccaatgctgttgagtgatttggaacacagacaggaaatactttgatgaataaatgaggcatggctgctgtaaatcatgggcataggtctaataattttttcacaattttatactgcctcaggattatttttctgtgtttgtattttaggaaaaaagtggaaagaccagaacattgaatatgagtaccaaaaccccaggagaaacttcaggtaatttgcacttataagagaaagcagtgtctctctacacgatcttagaatatgagactatgttaaaaataagtaaaacaaagaactaagtccaggatcaagttcatttattcatacaatattttatctaaaaatatatatttaaatgtgatcaaggctgagggctcactcctgtaatcccagtcctttgagacatggagataggaggatagcttgaggccagcagttcaacaacagcctgcgcaacataacaagaccacatatcaacaacagcaaaaaattagctgggcattgtggtatgcatccgtagtcccagctactcaggaggctgagacatgagggacatgaggatcacttgagcccccaggagttaaaggctgtggtaagctatgatgataccactgcactccagggtgggcaacaggacaagaccctgaaacaaaagaaaaatgacacagagtatttagtattttaaaatagtttacatgggaagagtattaagaagccccatataaacatttttttaaataataggtatggctaggtcaccttgtagaatgtgttgtccagtcaccttcaaacaattcagacagggcagaaagcctacactttgatggagagtgttaaaaatgcaagtacaatacttgctgattaatataaaattacttataaacaaactcttcataatttgtttctcatttttgacaggagtgtcacagaagagaaagtcaatgaaattaaagaagacagtcattgtggagaaacttttaccccagttccagatgacaggctgaacttccagaagaagaaagcttctcctgaagtaaaatcatgtgacagctttgtgtgtgaagttggcctaggtaactcatcttctaatatgaacatcagaggtgacactggacacaaggcatgtgaatgtcaggaatatggaccaaagccatggaagagtcaacaacctaaaaaagccttcagatatcacccctccttgagaacacaagaaagggatcacactggaaagaaaccctatgcttgtaaagaatgtggaaaaaacattatttaccattcaagcattcaaagacacatggtagtgcacagtggggatggaccttataaatgtaagttttgtgggaaagcattccattgtctcagtttatatcttatccatgaaagaactcacactggagagaaaccgtatgaatgtaaacaatgtggtaaatcttttagttattctgctacccatcgaatacatgaaagaactcacattggagaaaagccttatgaatgtcaggaatgtgggaaagcattccatagtcccagatcctgtcacagacatgaaaggagtcacatgggagagaaggcttatcaatgtaaggaatgtggaaaagcattcatgtgtccccgttatgttcgtagacatgaaaggacccactctaggaaaaaactttatgaatgtaagcagtgtgggaaagcattatcctctcttacaagttttcaaacacacataagaatgcactctggagaaagaccttatgaatgtaagacatgtgggaaaggcttttattctgccaagtcatttcaaagacatgaaaaaactcacagtggagagaaaccgtataaatgcaagcaatgtggtaaagccttcactcgttccggttcctttcgatatcatgaaaggactcacactggagagaaaccctatgagtgtaagcaatgtgggaaagccttcagatctgccccaaatcttcaattgcatggtaggactcacactggagagaaaccgtatcaatgtaaggaatgtgggaaagctttcagatctgcctcacaacttcgaatccatcgtaggattcacactggagagaaaccctatgaatgtaagaaatgtgggaaagccttcagatatgtccagaactttcgatttcatgaaaggacacaaacacataagaatgcactctggagaaagaccttataaatataagatatatgggaaacacttttattctgccaagttatttcaaacacatgaaaaaattcacactggagagaaaccctataaatgcaagcaatgtggtaaagccttaattgttccagttcctttcgatatctaaaaggactcacagtggagaaaaactctatgagtgtaagcaatgtgggaaagtcttcagatctgtcaagaacctttcaatttatgaaaggacacacactggagagaaaccctatgaatgtaagaaatgtggaaaagcgttccataatttctcttcttttcaaatacatgaaagttgcacagaggagaggcgccctaagaatgtaagcattgtgggaaagcattcatatctgccaagatcgtttgaatacatgcaaaacacacactggagagaaacctatgaatgtaaggaatgcaaacaagcattcaattatttttcttccttgcatatacatgaaaggactcatacgagagagaatccgtatgaatgtaaggattgtgggaaagcattcagcttgcttaattgctttcatagacatgtaaagacacaccagaaggaaaccctatgaatgtaagcaatgtggcaaaagctttcacttcttccagttcttttcaatatcatgaaaggactcacactggggagaaaccgtatcaatgtaagcaatgtgggaaagccgtcagatcagcctcaagacttcaaatgcatggaagcactcacacttggcagaaactctatgaatgtaagcagtatgggaaagccttcagatcggctaggattctttgaatacaaataatgaatgtaaacaattaactgtttataataactgtatactaacaaatgttattctttttaaataattaagaagctataataaaatatccattggtgtcatgtattagatcaagcttataatgttacattgttattatttggatattgtgaatcagcattacctggattaaatgccaggcatatttttcctcatgtaaactttacttttcatgcttatgtactttaatttttatttcaactgtaatttttctttttttttccttttgctttttctttttcttttttttttttttttttttttagaaagagcctcactctgttgcccaggctggagtgcagtggtgtgatcttggctcactgcaatctctgcttcccaggtttgaacaattctccttcttcagccttttgagtagctgggactacaggcatgcaccacttcacccagctaattatgtgtattatttagtagagacggggtttcaccatattggccaggctggtctcgaactctggaccttgtgatcctcctgcctcggcctctcaaagtgctggatttacagacatgagccactgcgcccagcctcaaccctaatttttctttcactcataataccaaaagttatctcatgtatctctgagtaccttcttgcccaaaaccagcagcgccatacctgctgtcagcaagggtgtaatataccatagtgataaatatgaccagaagacataaatgactgtgggatgtatgagaattacaagtcacattggtaagaagataaaaattttcgtcatgtttatgatttgaaatatgtttacttctatcagttttagaaatacagttacaaaatgcccttgtttttgtcctggtccatcatgatcactgaggagcatcatctcatatgcctgatatgtaacatgtgtctctccaacagtaaaagacttggccttggctgggtgtggtggctcacacctgaaaacccagcacattgggaggctgaggcaggcagatcacctgaggtcaggagttcgagaacaccctgaccaatatgatgaaaccctgtctcatctaaaaatacaaaacttagtcagccatggtggcatgcttctgtaatcctagctagtcaggaggctgagaaaggagaatcacttgaatctggcaggcagaggttgcagtgagccgagatcccatcattgcactccagcctagtcaacaagagcgaaactctttctgaaaaaacaaaaacaaaaacaaaaacaacttggccttgtggtgaggggaggtcagctatagacttctggacctgtttttgccttacttattctgtaaagactaaaacattttctaaaatgtatgggcactgttaactagaaggtaccttagttaaaatatataaattcatttacgctttataaagctatatttttttcaaattgctttactgagtcataggaggctaataaatttgtgtaaattgtctaaataaaagcctttcttcctctgataatgtgctgttgatgctaacttgtcaacagcctgcttatctcagcagtgtaaagttaacggtaacatggaaaagtcacttttatatataatgcaatggctagaacaattctgtcacttcctgtaaggtccagtgaagctgctcttcagaaacagttatttaaaatccttatagtctaaatctaggcaccacaggatgcagaatcaatcactgaccaagccctgtctgtgtgtggaggtgacacacccagtcccagataatgtatccacatcagtgaagggaggagtcattgattgtcggatcacacaaagtaactcagaacagggaagacagggcagtgaaacctggccaggcatggtggctcacacctgtaatcccagcactttgggaggccgaggcaggtggatcacttgaggtcagcagttcaagaccagcctggccaacatggtgaaaccctgtctcgtctaaaaatacaaaaaaatagctgggcatcatggtgtgtgcctgtaatcccagctactcaggaggctgaggcaggagaatcgcttgagcttgggaggtggaggttacagtaaactgagatcacaccattgctctctccaggctagtcgacagagcgagactccatcacacacacacaaaaaaagttgggtgcacctgaatccaacccctgcctcatccttctgaattgaaggccaaatgcaccctgatacttttcaccaaagagtagaaacaacaccattcacttgaccccaaatgtgactttccacaggatgcaagcacagtgttggaatagccaatgacagtgacaatagaagtgcagggtgagggtgatgaacaggacacactggagagcctgacattaggctagatattggggtgtcttgatgcttcacaaagagcccaaggagcaccccaaagaggacactggagcacaggcccaaaggatcttcgtatgccaggaaggccactaattttggaagtcagtgatgttggtgggtttagctttgggaaaagaaatagggaaaatcttttcttacagcttgagaaaaatgaataaacttccacaacaaagtatagtagataaattggtgaattacaaagatttagcaaaatatcagtcctcctttgcaagttggagaacttgtaacagtggataactcttctcttcctattatttgtgaggtaacacctggctggcaactgttgtcatatgtttgtgttcacatgtgattaatatgtagtatgggctttgttatcatggaaatcataatgaaataatattgtccaccttaataagataacaagattcagagaagatgattaaatattgagtatttctgagcacaaagtttgaggatagccactggggaaacagatatcctgaagagtggggtcagtgctccaacacggggaagttgagtcttcacttctgtagggcaaaatgtagacgcttaacagggtgacattttccatacaaggccagtgcacacatttcagtgatttggttggttgcagctaccaaatttcaatgatgattgccttaactttttgtaaggaggggtagtggtctcaaaaggatcctacctctgtcacttcccactcttttctaatcatttacagcccaagaacaacaaagataattaatctttttgatattcacaggaaaggagctattacatggtagtgtaaacacatttctcaatatgtttattgactgaaagggttagatacttttactttccctcatgagggatgaaaggtaagtaccttataatttccttctagcctataaacataaaccgagtttgagagattttgctggattcttcaaacgctgggtattttctcattgaaacagaggccagagtccagtgactgcaagctaaggacaatgagaagcctacaaagagaggttattgaaagctcacgtcaggcggtgactcacacctgtaatcccagcactttgggaagctgagtcgggcagatcatctgaggtcgggagttcgagaccaacctggccaacacagcaaaacccatctctactaaaaacaccaaaattagccaggtatagtggctcatgcctgcagttcccagccattcaggaggctgaggcacgataatcgcttaaactctggaggcagaggttacagtgcaccaagatcgtgccactgcacttcagcctaggtgacagagcgagactctgtctccaaaaaaaagaaaaaaaaaaaaagctctcacttggttcttcccatggtgcccccactgcaggtgtaccagctactcacgttgaccatgggaggagccctttataataaaagaatctcagaatcctggaaagctggggatccacaggcagatgcagtagtcagtgatgccgtgcgcaagtgataatttttgtcatggggctttttctagacacttctagtgaaacaaatgtgggtttaggtaagaaataacttttaattctagaccttgaagtcagcttgtcattaaaagaggtcatttaaaaaaaaaaagtctaggtactggacttgtaagtaaaaataaaaagattaaatacctaaaatggggttgtatataggcttagaaggagtcagtcaaaaattcaggggctgctgggcgtggtggctcatacctgtaattccagcactttgggcagatcacttgaggccaggagttcaagaccacccttgaaacatgggtgaaacacccagcatagtgaaacaccatctctataaaaaaatacaaaaattagctgggcatgatggcacacacctgcaaccccagctactccggagaatgaggcatgagaatcacttgaaccagggaggcagaggttgcagtgagccaagatcatgctactgcactccagcctgggctacagaacaagactctgtctcaaaaaaagaaaaaaaaaaaaaaaaaaaaaaaaagttcagggacctggaggaaggagagaaactgaagcatgctttgattaatagatatttcattttgactgatcactaaagacaaagctattcacctaatggtttgtgaggtgaatactggaatttctagtctgtgtctggtttgtcataggtaacaaacgtggcatcatctaagtcataaggggaagggtgttttgttgtagtaaggtgctcttgcacaacacaaaggatgggggatttcttgaatcacacctcttttcaggatgacccacccacccccatctccttttcacaccccttactctctttgatttggctgctcctgagttgtatccttcataataagttggtaaatgtaagtgaactgtgggtagttctatcaaattatggaacttgaggaggctgttgtacaggacccaggtctagatgcagttgctgagaagtacaggtggcccctggggctttgagtggcatctgctgagtggggctgtgttgggtgagccaggaactcatggagtctctgctaactctgggtggcttctgaattgagtggttgcatgactgcttagtgctggagaattcgctggtgttcagcaagcaccacacatttggtgtcagaaaaaaagacagcataggtcagaaccttccactgactcacagtgagcgagtggtctttggtgggcattgagaccccggtggaaggactgtgtccacactgtggggaggggccagcagggtgtgtgtggaagtcccagaagtaattttctggctgctcacatttccctcacacactacctaagagtgggccagcctggcctgtgtctccacagtcccagtggttcctaagcttgggaatgtgtaactattggagtgtgggtttccttgtgagctgtgggtgaggcaggctgcctacctgagctgcctcccttttgtttcttttacaaaatcttgctgccatggaattgctctttccccacgcctctgagaatttattttattttatttacttatttactttatttatttatttatttttcacacaaaatctcactctgtcgctaaggctggagtgcagtggcgcaatctcggctcactgcaacctgtgccctccaggttcaagcgattctcctggctcagccttccaaatagctgggactacaggcatatgccaccacaccctgctcttttgtgtgtgtgtgtgtgtgtgtatttttaaagttatggcaagttttcaccgtgttgaccaggctggtctcaaagtactgacctcaagttatccacccacctcaacatccaaagttctgggaataaaggcatgagccactgcacctggccacatctaagaattttattctatgatttgcatgttaggattttaattagctggttggaaacttagtgaatattttgataatctttgaagaaggaaatcgagttcttgaaataagctgttttgtgccaagtcaaaataataacaatatgaatactcagagacatatcaccccaaaatggataggccttgggcagttctggtgtgtctccttggtctcacttatttttcgtatgcaaaggtgatcaaagttttgattccttttgttattttttgtagctttgtcatctctttgtcacaaagcagaattttgccacctttgaattttcagtaacataatactaccattaatacaccattagtattatgctgagagggtgtatttctgggtttttccctgagcctgttgcaaacatgctgctgtgtgaagttgtgggtcatgtaattgacttgcctatttccctgcttaatgggacttgagttggttcaagtctatctttgttcttattgacaattctcttcttgtttttgttcctaattggaaatacaacacaaattcttacatgttgggaaaaaattgctgggttgtagattatgaataaatacaaaattactaggaaatgtcgacagagtatgaatgtaacttatggattaaccatctcacctttcatagatgtgtctttattcttgtgatttgccaacactttgaattatctaacgtactttttattgcccatttactctgaaacacaatctctgtgtgattacgtattgctttttactggttgccattggtttagcatttttcctatatgatctttcatctcctgtttagctgtttccagtcatcctcttacatttgactaattggtagttatttttctttctttttttctttttttgttaatttgacacagccttgctctgtagcccagctggagtgcagtggtcactcactgctccctgcagcatcaagctcctgggcttgagcaatcctcccacctcagctttctgcccagctaattaaaaaaatttttttgtagagacaggggtctcactgttttgcccaggctgctcttgaactcctgggctcaatcagtcctctgccttggcctcacaaagtgctgggattgcagacatgagccactatgctcagcaatagggttttttcttttttttaaaccatgtttctgaccaatattttattaaaatctttaagaactgcatgctaacaaaggttattctgttctgtttttcattttctgttttacattttcattatgattacttgtttttcttttttattctcattttttcctagataattacaatacttttccatgtagtggccctggcatgcattttcatccttcatgcaatcatacagctacctcgatgtcccttctctctgccattctgaaattggacctcactcctttgtgactcttgctccccatctgctatgtgataaagtcctgtctgattacatcgtctccaaagcctctttttggacttctgtttaccccttggcatgccctgcatttactctcttcaaaatatatacttagaggccgggtgcggtggctcacgcctgtaatctcagtacttttggatgctgaggcaggaggatcccttgtgcccaggagtttaaaaccagcctgggtcacatagggagaccctgtctcaaaaacaaaatttatagttacaagtcctaaaccccaacagggtcatatttggacacggaccttttaggagatcacatacatttataaaggagggctctcacaatgggattagtaagagagagagagaactctgcctctccagcatgtaaggacaaagcaagaaggcatctagctgcaagccaggaagatagccttcactaggaacaaaattgttggcagcaagatttcagacttcccaagcttcagaactgtgaaaaacaaatttctgctgtttaagaaactgagtccatggtactttgttatactagcctgagctaagtcaccccaagagtcctcacattaaccatatactgtcgtacaagtgctgcatttggatctacctgtaatgtctccaaatctacttttccttttggacccattgtgagaacaggtttgcctcatagacaactgctggtgatattagtgatagcctaccaactagggactaaaaagaaagtttttcttttttttttttcttgcttttttttttgagatggagtttttgctctgttacccaggctggagtgcaattatgcaatctcggctcactgccagttctgactcccaggttcaagtgattctcctgcctcagcctcccaagtagctgggtttacaggtgcgtgccaccacatccagataatttttgtactgttagttagagatggggtttcaacatgttggccaggtggttctcgaactcttgacctcaggtgatccacctgccttggcctcccaaagcactaggattacatgcataaaccaccacactcggcctctcattcatatgtgtgtgtatattctgtttttaataaaaatagagactaggcctatgttgccccgtgtggtcatagcccaaacttttgggctcaagcgatttactcacctcagccacccaaaatgctgggattaaggcatgagaaactgtgccagggcaaatgaaagaaacttagtgggaggccaggcacggtggctcacacctgtaatcccagcactttgtggggctgaggcgggtggatcacctgagctcaggagttcaagaccagcctggacaacatggtgaaaccacatctctactaaaaatacaaaaaaattagctgggcatggtactcccattctcacagtcatgcaaaggctctttcttaaggattccacctgctggaaagcattatatactgcctgcactgactcaagagtgtctggtttcatctccatgtcataattacaaccacaatcctaaagggactgatttaccacactgtggttgccgtaagtcccaaattgtaccctcagcagcaactatatcatcccaagtcacagctctaccctctaaaggtgtgcctgaggcttgtgcctgccatactaacacattaacctgtccaaagcttccttcagagctgtgtcccagtcccaaagtgcccctttctaaaacattgggctaagtgtcagataaatgctctccaataatccaaagaccaacaaatgtctggattttttttcttaagagaaatagtatggctctgtttcccaggctggagtgcagtggtgggatcatagctcactgtagaaactcgggctcaagggatcctcctgcctcagcctcacaagtagctgggagtaaaggcacatgccactatgcccggctgtttttaaattttttgtacagatggagtctcactctattgcccaggctgttcttgaactccaaggctcaagtgatcctcccacctcagcctcccaaagtgctgagattacagttatgaaccaatgcacccagaactcaaaaaggaatatttataagggaaaatatctaatgttcaaattgttatgtatagagcagttaacgggaactatcatttagggtctatgggattctaggacactaggtatgaaacaaatatgaggaaggtcagagaacaagctgacttgatgattaatgctgaaggtgccgcaagcttggtttaagttttcctcctcccatcctccctgatgaatttgataaagtttaaagggatggtttcaccgggggctttttccactgactgcaaggaggtgatcccgcttggtaaatcttcagtaggccaagcctcttacgtggctagaatgatccagtccataaggaaatgtcaccacctgctgtattttacactttgaccatcaaaggggtacagggtttccccagggagtttggtgggattttaattttttgtttgtttgttttgagacagtgtcttgctgaagcgcagtacccaattatagctcacagcagcctcaaactttggggttcaagtgactctcctgtctcagcctcctgagtagctgagactgtaggtacacacacttctccttggtaattaaaaattttttatggagatgggagggtctcacttcacggctcagggtggtctccaatctcgggcttcaagcgatcctcccactttggcctcccaaaatgttgggattacaggcgtgagccatggcacccggcctcccaggctgttgtttgaaggtctttgcaatctctaagagttctgcagcaatttattccctgacagtgagagtctcatcctttgaccccattttgccgcagtagctgaacgttcacttttctttccataagggggcgagcttgccagtgaccctaatccctctcctcatcgatgacttctttgtcatcagagccttcctcttcataaattcccacggaatccaagttttcacgtcccaatcgggcttagttatgatagccacaggcccacaccagctgccacagcacccctgtcccatggaaaccgcctgactctcttctccccaagcgtcctgtcccaggagcccccatcatctctgctcccccgggctccaggccctagagccgcgctgctgcagagcccggttcccagggctgctccctccatatatccacattcatctccagctctccaccctctctccaaccagccaggcccggaggtactgcagtgtcactgaacgtgcgtccctcagctgccacctccaccacgatctggaaatcttttaaatgcacttaagttatcttagaattttccttccccactttatacataaacataggaggagagcagggactctgctggtgtcttattcacacaatgggattgagggtgtttgtgtcatggaactgatcaatggggtgagaagtagctgaataacctgcagggggcagcagagcccgaggccggtgactcaacgctgaggccagtgtggagcctgcaaaggaagggaaaggagcctttcctgggggcttccgggcagcccgccctcccctacaggtggcctccaattgctcagagcagctccagaaggagtgcggattccgagaagctgaagagccctggaaagcagaagacccacatgcacacgtatgtgtgggggttctgtcctttctggtgttgtacctctggagcctggggctgtcttctgggcagggtttggggtttgacatgcatggggccactggggtcagatttgtaagatacagtgaatttctttaagtttttctttaaagatttagcctgctaacttcctcgtcttttgttctcaaactcaactttcctgttcctccttgcccctagttactttaaaacagcctaccccgttcccatcagctctaatcaataactcacatctgttcccttggttacctgtacccattgttcccccaaaactgcacatctcacatgctccacctctgtacctcacatccccctccccttctatatttagaaaaatatgtacaagcagccaatcgggtcagctcagactgtgcggtccgaccccagcccatgggggagtaacacagagatagggaccgcattaaggataaaaacctcctggtctcctttgttctctgtgctcttgtgatcttgattgacgtgagtggcacccttctgcagtagtaaattgccttgctgagagaattaaaattttgcctgagtgctggttttacttcacggcaccaagcttttattccgggagcattttatatccaacaattctaggggatcgtccgagatccccatgctccttttggaagagttcttcagtcaccctaccctggggagacgcgtcccactgccccattgcggtggcctcagggacaggagatcgagacccacccattttgacgaataaacccggactctcagcaacgcggggaagagaggcttgcaataccgcagcgaccaggtaaactctgtgcacagaccaaggtgggaaacgttgcaggggcaacaaagtaattctttggtagtcggaggggtgtgtcagggcattctgggggttgaaagtgcatgaatggtaacaagcactactgctgtgcggagcgagtgagtccaatctgcggttctgtggtcacctcacacggcttagggcagccctgcgggggtcctgtcacaggtttatacggacctgccatcaatgctaagaggaacctgaaacaaacctgcgagggaagcggccagagtggatgaagcgaaagaagggtgcaaggaacctccagcaggtggagctaaaggatagtggaattgagccttagccacacttccagtgagggataggcaaaagacctcctaatatgaggggttgagccacaaggaaccccccaaataggcaagagatccttaatttgagaggctgagccacaaggaacccccaaaataggcaagagatccttaatatgaggggttgagccacagcaagcccccctaggcaagagattcctatcacgagggattgagcctagccaggacccagtataggaaatattacaagcaaaaaagacaaagttagcaacaaagatatcccccctaatagtcccctaggtctcatgttaaaacattagaaagataatgaaaagactaaacataagaaaaagcaattagtgataaaatattgctgttccatttagactcaagaacgaatccttgaacccttagttttctggccagaatttaagtcgaatgagggatggatttgtgaacttctaatagaaaatgttgctagtagaagacctgcctcctgagaagaaacaaattatgccctatgttagttgcaaggagttgtcctttcccctcctccaaggattgaaaggagcaagtcaaaaactaatatttggaggaaaatgagttgtacatgtgccctattaagatagaaccatctttaatgaaaaagacagtgaaggaaggggcttgggggatcctagcaaaaagaacaactcgcaagatcccctagaccattccccacctaatacccaacccttcccctcaggcatcgcccagtaagtctgttcttccccagcctaagtccctctcccctaaagaactccaagctcctaattcaccagatggcttttgccaggctagcaacatgaaggatctgccgcaacatgttgtcagcgttgtctggcccatagtgcacccctgcagcggcaaagcccatgctcctgcccactggctggtccaaggtcctggcactgtattgacggcagctctgcatgacatgcgagccaggccccagcctatgccccatgcaaactacattataggatatctgccttactttgctgaggctaagtaatacggggcttcagcgatggctccaagcagcctggcatccccgcagctaagtttcctgagcaagaagtagataatctttcagcggatatatccactagcatttattatagtcaggccagtgttaaaagtgaaaatatccaccagaaaagaactctgattctttaaagtcacctatgttaaaatgtaccaccaaaaaagaattacatgtgtataaatatgaggctattctgttaaaaatgatagtttaatgttactagtaatttgcttaacctaacaagtttcttaacgaaagatccaaatctaaaaaggaagcacacatgtttagatttaactgattaccatacaaatgtccggccaaacttaagagaaacccccttcaaaaatgattaaaggaaaaaggattcaacagatgttcaataataaatagagaagttcctagagaaataaaatttaaaaattgtttaatagtttacccaaatttgtaagctgtttgcacttagtcaagctttaaagtaactgcaaaggaaccatctatactaatctatattgattctaaatacacctttatcgtggctcatacatttagaaaatttcagacaataataaaggtcaaagccttgttcatgaagagttaataacccaagtgttaaataaccttcagttaccagaaaaaaaaaaaaagctattttccacgtccccaggcaccaaaaatcctatctttcaagagttaagaaaataacctagcaaatcagataatccgaaccagctgccgtttctcctgtaggcactgaagggaattcaaatgttatttaaacctcttatgaaagaagtcctatcccacctaaattagaggacccattaaagacctcaagctatgtatagcacagttaaagtttatatgtgtatgaaaatgtacatccttagccaaacaagtctagaaacttagttgccataactcaaatgtcttctgtcttcctattaatccaaactacctctcaaagcaatccactgccaacattcctacatacttggtttatcttccactttctcttccctcaaaactcacaattttccagtacaggtgcggctcctggagttcccagtgcgtcaacaccggcctgaggagctggcctagtacttcccaccattgaaactgcagtctggacagcagagaaaggatagacccatcacacccgagtcaagaaagcaccgccacccccaaagtcgtaggccattattccaggggaaaaccccctcaaactaaagctaagaaaaatttaacctcttacatctattctattactctttcttcttttccccttccaatgctgaccaccttgtcattaatgtaactcaatcaaactcaccccaagttatcacgtttaatgctatgtctagtcataccctgtaaagatctccaaagtcaaagacaagtctcagcctcagaaaagtatctctgcccctttaaggtgaaaggccccccctaccaagactcttgttccttaacaaatataagaaaacaagtctgtcatagctagaatgatgtcctatggacaaccaaatgtcaaggctagacctcatcagcaggtggctgtatatccttaaaaccatacattcatttcactaaaaaaagcacctccccaattgccagtataatcaatgtaatcccatacaaatttccacctctactgaccctaaacctactttaagtcacttctatggaacaggagccaacttggccagcacagacctcataagatctttcgaaatgcgttttattaatccttcattctcttcacccccttccttctcttctccttctaagctttcttctaatcagactgccacctgttttctacctaatgatactactaaagtaaatattgtagaagtaaaagatttaagacaaaccctagcaattaaaacaggatatcaagatgtaaatacctggttggaatggattcaatattccgtccgcacattgaacaaaagcaattgttacgcttgtatgcatggcagactagaggcccagactgtttcctttccactaggatagcccttcagccgaccaggcataggctgtatggtagctcttttccaaaattccacagcctggggcaacaaatcatgccaagctctctctctgctatatcccgaagtccaacaacctgcaggccagcccccaaaggccattcagcttccttctcctgacgtcaatttcacctcatgtctctcacgacgaggggagaatctggcgttccttagaagcttaacaagatgcaataagcttaagcccttccaaaaacttacccatcagtctgcccttagtcatcctcaagcagatgtatggtggtattgtagtggacctttactggatactctgccaagtaactggagcggcacttgcgctcttgtccaattggcgatccctttcacactggcatttcatcaaccaaaaaaaaagaaaagccacaacaccaaaaaataagagaagccccttataagtcttttgactctcaagtttacataaaggccattagagtcccatggggagtgcctaacaagttcaaaacctgagaccaaataactgcaagatttaaacccatatttccccgaataactattaataaaaatgtagcttcgataaattacatctattataattagcagcagtttatgaattacaccaaggatcttatcaaaaaacagctgaccagttaaggcctactagccaaatagcttaagaaaacagaatcacttgactgggcgcggtggctcatgcctgtaatcccagcactttgggaggccaaggtgggcggatcacaaggtcaggagatcgagaccatcctggctaacatggtgaaacccccgtctctactaaaaaatacaaaaaaagtatccgggcgtagtggcgggcacctgtagtcccagctactggggaggctgaggcaggagaatggcgtgaacccgggaggcagagcttgcagtgagacaatatggtgccactgcactccagcctgggccacgaagtgagactccatctcaaaaaataaaaaccagaatggctccagacatgttattagccaaaaaaggtggagtttgtgttatgattaaaacccagtgttgtaccttcattccaaacaacactgcccccagtgagagcataacaaaggccttgcaaagacttaccgctttatccaatgaattagctaaaatttctggagtcaatgaccctatttcaagatggctaggaaagtagttcagtcaataaagaatcatagcctcaatacttatttcttttacagtcgtaacaggtgtacttattcttgttaggcgttgtgtcataccatgcatccgtaggctaatacaaaggattgtacgaacagcatttactgaaacctcccttagttctcctccaccttattcaagtaagcttttccttttaaaagatcaaatcaaacagcaaagccaaaacacgttaaaaaagtttaaagagaaaaaatcataagaaaattaaaagggaggaattgtaacatacagtaaatttctctgagtttctttttttttttttttttgagacggagtctcactctgtcacccaggctggagtgcagtggcgtgatctcggctcactgcaagctctgcctcctgggttcatgccattctcctgcctcagcctcccgagtagctgggactacaggcgcccaccaccacgactggctaatttttcgtattttttagtagagacggggtttcaccatgttagccaggatggtctcgatctcctgacctcgtgatctacccgcctcagcctcccaaagtgctgcgattacaggcgtgagccaccgcgcctggcctctctgagtttctcttcaaagacttagcctgctaacttccttgtcttttgttctccagctcaactttcctgttcctccttgcccctagttactgtaaaacagcctacccccttcccgtcagctctaatcaataactcacatctgttcccttggttacctgtacccattgttcccccgaaactgcacgtctcacacgctccatctctgtacctcacgttcccctctccttctatatttagaaaaatacgtacaagtagccagtcgggtcagctcagattgtgtggtcgaaccccagcccatgaaggagtgacacagagatagggaccgcattaaggataaaaaaacccccggtgacctttgttctctgtgctcttgtgatcttgattgacacaagtggcacacttctgcagaagtaaattgccttgctaaacaaatgaaactttcccctaagtgctagttttacttcgtgggaccaagaatttattcctaaagcattttatatccgacagagatattcatatatataaagaaaatgtgggccaggcgcggtggctcacgcctgtaatcccagcactttgggtggccgaggcgggtggatcacttgaggtcaggagttcaagaccagtctggtcaacatggtgaaaccttgtctctactaaaaatacaaaaaattagccaggcgcggtggcatgtgcctgtaatcctagctgctggggaggctgaggcaggagaatcacttgaacccaggaggcggaggttgcagtgagtggagattgcaccactgcactccagcctggggggacagagcgaggctctgtctcaaaaaaaaaagaaaagaaaatgtgtgaagatcaggctagagacagaaatgtttgggagcgtcacctggataaagggttcatgaagttggcagtttatttaggtcaaaagcttaacttaacccctggagagagtttcctgctggtgaaaatgaagatctggaaggaggaagcattttcacactgtgaggaggggatgggggtgtgagagcaagtcttagccatgcctcatccccagttgcggcccgctccaagacatatgcctctcctcctggcgcagtcgtgtctggcctggtctcggttcccctgctgctctgaggcaggagatggctcctgtggacactgaatctgaaattccctgcacactcctgtgaccccatgcagaacgaaggagcagggacagtcccttgagtgaggaagacgctagtgttctcctctatcaatagcaagtttggctgaaatgcaaatatccaataaccagagtgcaggaaggagctcgcccttggaaaagctgtggtcagaatccgtctgtctggctctgcagggcccgatacccagggcttccgctgtcactcagacatggggggcggggcctagcattccatccaatcagaggcattgtggcgggtccctgcccactgttcctccagacactgagggggtcgcattccttacctcacctttgtccctgcgcgggctgcggctgggatccggtctttccagccccgagagggacctggttcctctgcccaggcttctgtcactctgtcacctacgctatgccctgctgtagtcacaggaggtgtagagaggaccccgggacatctgaaagccaggaaatggtgcgtgtctggggccgggtgtcgtgagacgggggaggggctgcctggaccgaccggaaccgactgtggcgagaccctggctttcctgcgggcgactttgggatctgggaccgagtcctcctggagccgctcggccctcggtcccctcgactgctcggtgtggctgggccggtagccgggacaccaggcgtcctgtctcgtctctgcgcggcgactgcggttccagagccctctatgggcagctccgcgcccgcagccacgcgtctacccagattgtgcgggggccacgggagggtcatgtgggtgatcccgactcgggtgtggggttcgtgcttgggaggagcagcggtctgtggggcccccagtgtccactttttctcctgttaaaaattaaactgaggaacgttaacaaagagttcatttgagcaaacagcgattcacgaatgagacacacccagtcctggcttgtggtttgtcaacggaaaaagccaaactatgtaaaataaagaagtttattcggagccgaataggagagaccttggccgagggaaaaacaaccccaagaagcctggagtaagtggtcccgaggcggctcaagacagtttggttttattcattttagagagacaggaattgcagggaaaatcatgaattagtgcctggaaggtgtaatttccttaggcagaaagggagggacctggccgggcacggtggctcacgcttgtaattccagcactttgggaggccaaggcgggcggatcacctgaggtcaggagttcaagaccagcctggccaacatggtgaaaccccgtctctactaaaaatataaaaaagaaactagccgggcgtgatggtggacgcctgtaatcccagctactcgggaggctgagacaagagaattacttgaatccaggagacaggttgcagtgagcccacacagtgccactgcactccagcctcagcacagagtgcgactctgtctcaaaacaaaaacaaaaacaaaaaacagaaagggcgggacctgtggaaggggggttagaaggcacaggtggttgagggattctgtaggtggcagctggttgagagtgtgaagctttgtctaaagtttggaggaggtaggaaggaatgctgaaggaagggggtctgttatctgccacttgattccatcccagccaaaaaacagacctgtttctctagattttatgaattctaaggtgtgacttacccttgtcttgcgtggccttaggtcttgtttgtaatttggtatcttcttgccacaaggagtctgtttttccagtcagataatgtctgtttttacatgaatgtgcgtcagttgctgcatgtaaactcctaaagggagagggtataaggaggcctgtctcacctcccatcctgtcatacagaggcactcaattttcagggttttttgggggttcccttggccaagagccggtcacttcacttacctgggaaggtactttgtttttgtttttatttaaaacagagtctccttctgtcactcaggctggagtgcaatggctcaatctcggctcactgcaacctccaccttccggattcaagcaattctctagcctcagcctcctgagtagctgggattacaggcacgcacctgaagggggcctgcccctccacccctgtgggtgtttcttgtcaggtagagacaagagactgagtaaagaaataagacacagagacgaagtatagggaaagaacagtgggcccaggggaccggcgctcaacatgcgaggacctgcaccggcgctggtctctgagttccctcagtatttattgatcactatttttactatcttggcgaggggagtgtggcaggacaacagggtgatggtggggagaaggtcagcagggaatcatgtgagcaaaggaacctgtatcatgaataagttcaaggaaagatactgtgcctggatgtgcaggtaggccagatttatgtttcactttatgcaaatatctcagtgtagcaaagagtaacagagcagtattgctgccagcatatcttgcctcccacagggcggttttctcctatttcagaatagaatgaatggtcggctttacacagagacattccattccccggaacgagcaggagacagaagccttcctcttatctcaactgcaaagaggcctccctctttcactattcctcctcagcacagaccctttaggggtgtcaggctgggggatggtaaggtctttcctttcccacgaggccggatctcaggctgtctcagtgggggaaaaccttggacaatacccaggctttgttgggcagaggtccctgcggctttccgcagtgcactgtgcccctggttaaccgagaatggagaatggtgatgacttttaccaagcatactgcctacaaacatattgttaacaaggcacatcctgcacagccctaaatccattaaaccttgattcaatacagcacaggtttctgtgagcacagggttggggctaaagttacagattaacagcatctcaaagaagaacaatttttgttagtacataccaaaatggagtttcttatgtcttccttttctatgtagacacagtaacaatctgatctctcttttccccacatgcaccaccacgcctgcctaatttttgtgtttttagtagagatggggtttcaccatgttggccaggctgttctcgaactcctgacctcaagttacctacctgcctcggcctcccaaagtgctgagattccagatgtgagccacctcgccaggccagaagatagatttttatttttagtttataggttgaagcctcagcttttataaggtacatgaggagacaaaccagataaatgcttgattggttgcagagatgcagtcgccttatttggacttgccagcccgaaataattcaaaggttcagatttcagtttgaagagtttattcaagcagaaagatagcaatggcccattcaggaaaaaaaacagactccagagaaatggactcagtactctaaaattagaagttaagttctttcttatattaccaggaaaagaggtcctgatcagaccccaagagagttcttggatctcacacaggaaagaattcaagacgagtcacaaagtgcagtgagaagggagtttgttgaaagctactctgggccagcatgatggcttagatctgttttctaagcacattgggaggccgaggcaggaggatcacttctagtcagcagttcgagaccagcctgggcaacatagggaaaccccatcttttccaaaaataacaaaaattagccgggtgtggtggcttgcacctgtagttccacgtactcgggaggcaagcgttcaagacccagctggccaatgcagtgagagcctgtctgtattaaaaaaaaaaaaaaagaaaagaaagaaaggaagggagggagggaaggaaggaagaaggaaggaaggaagaaaaaggaaggaaggaaggaagagagtgattctctgttacagagtagggcatcctcataaagcaagtggaggaatgtactaagtttttcttaggtagggatcttgtctatgtaaagactaaactaagctgtgcctacctgcatgggggctgacagcatcacaaaatttattactctattgatttaaagaaaactatcctttacattttagcacccaagtgcattaaaacaactataattatcttgaaagcacatattgttatgggtattgggacatcaggacattctgttgttgtgggagtgtaaggatacttgcaggcatcttcaggctgttttcttcatgggaaactttatgatcatgggttgtgactggcaaggagtgtttcttgttagtctcaagatggagctgaacttaaattggtgtttctctggctcccctaggcacctgcttccctaacacttgtatagggaaaaggcaaataaatataataggattgcattttccatagaaggctgatgtatgaggtacaataatttaattttatttttttctttgagcgaatgtcttgttctgtggcccaggctggagcagtggtgcgatcatggcttactgcagccttgacctccctggctcaagcacctcagcctcccaagtagctgagactacagtcgcccaccagcactcctggctgatttttttttttttttttttttttgtatgcaggtggcatcttgatatgttgcctaggctggtctctagctcctggcctcaaacagtcctgcttccttggcctccaaaagtgctgcgatcacagacgttagccagtgcacctggctagcaacttaatttgttatggtttgcttttttcccccagcgcttgttttcttttctttctagctgttttttatttccttttcaatttaaaagagtgaattcaacattccagctgaagacaatgtgatagccatgaagtctttgtgtgagaaagttaagagggaagttagtctactacagagatcagtagtgaagaggggcccagtgggatggctcacacctgtaaccccagcactttgggaggctgaggcaggtggatggcttgatctcaggagttcaagaccagcctgggcaacataagtgagatgccatctcaattgtgaaaaatcatattaaataaataaaaaaaaagtgaagagggaaagggtctttcctgtttcccttcagtcatttacaacattttacaaaacactataggtaagaaagaaggcgaatctgtaatcagggaaaggagagttccagctggctatgtgaaagctgtgtgtcatgtgactcaaccccatgattgcattgcttcaagatagagatccaccagcttaaatatttgaattactttgttgtttttgtttgtttgtttgttttgagacaactctgtggcccaggttggagtgcagtgacatcatctcagttcactgcagcctttgcctcctgggttcaagtaattctcctgcttcagcctcccaagtagctgggattacatgcatgtgccaccgcacatggctaatttttgtatttttagtaaacacggggttttaccacgttagccaggctggtctccaactcctgtcctcaagtggtccgcccaccttggcctcctgaagtggtgggattacaggtataagccagctttcctggcctgacttaggtagaaattttctagttatgtaatcagaggttaattggtggattctgcctgattaagcataaattttgtttccctatagattaataattttgaagagttgtatttaaatttgctttcagggtctttaagtaggaccttcggacactgcatacagttcggtctcattgttttttatttaaaattttccacaatctccagggagactgttttcccctggcattttccaaatatatgggatgccggatctcaaatcctccaccctcataccacagcctgactcttcaagggcttgcagtgaaatctgtgtctgaacatttcacatgagaggaaagcagtgaataaccactagacattttcccgaaaaatcctttctgcctctcctccttttatctttcctagacacagtcaccttatcaggatgtctttgggatgcggttcctttctggaaacattacagggtgatgtgtcttcagtgcaccctcctatcttttcctggttttgggttttagaactgcccggggctgactcaagatgcccacaactgccatgtctcccggagggtctcatgggtattagtgccttaggggagtggggcctcccgagggagcagctgaatgccttgtggtggaggagatgcctggtatactcttcatctacataaccaattcttggggtgctcaacttctctctcccaactccaatttccattaattggagacacatagacagtcagccaattggatgttgctattgaggaaaaagagaaatgattcctgtcctctggattgtctcaaccgtgaagggagaaatatcccaaaagacaaggaacagccactccaacatagtggagcaattgcctgcaaagcaagatatgcatgggggtacacaggggacacaatgcagtgttggtgggaaatagtcattgagcacttctcctttcctctcatgtgaaatgttcagagaatcaccaccagacactcccgtgtgaaaatttgtatgcatctcctcctttcatctatcctaaaaacagagatcttttttttttgagacagagccttgctcagtcgcccaggctggagtgcagtggcacgacctcggctcactgcaagctccgcctcccgggttcatgccattctcctgcctcagcctcctgagtagctgggactacaggagccttttagtagagacaggatttcaccatgttagccaggatgctctctatctcctgacctcgtgatccacccgccttggtctcccaaagtgctgggattacaggcatgagataccccacctggcctaaaaacagagatcttatcagattgtcttttggttgaggctcccctttggaaacttcaaagggtattgtgtcttcagcacactctcctatgttttcttggtcctgggtggtagaatggggtgacctaatattcccacagctgccatgtctcttggagggtctagtgagtatcagcccctgagtcactcctcccaggggacagactgaggtaggagaatggggactcccaagagagcagctgaatgccttacgatggaaggagactcctagtatactctgcatctagatagccaacccctcgagatgctcagcttttctttcccagtcccagttttcgtaagttggagacacatggctggtcagccagttggatggtgctattgagggaaaggagaaatgattcctgtcctctggattgtgtcaactgtgaaggaagacaaaaccccaaaagacaaggaaagcccaccccaacggggtggaccagtagcctgcaaatcagaatatgaaattgaggttcacagcggggcatagtgcggtgttggtggaaagtagtcatgagcgcttcggtgagcaggatgggggtggagagatgtctcatgtgatagggtgacctgtgctgacacatgagtcagacatcactgtgttccagccagtattgcccctctgtgggcttgtcccttgtaaagaatagttcatagattgcagcttgagtatttcaaattaactttacgttgcatttttcactagagccaaatccaagaatgattgcatagatcaggtaagacacagaagaggcaactcaacaaagcccatgacatacagtgcatggctcacaatcccaggagatgagggcagcacagctgcagagcaacacagagtggggagaacatccaggatgcacattcaaccagcaggtggggagcaagacagacagggacctgtgggccaaagcgtttctcagggtccagggaattgaacaaggagacgtcgctcagggagttgtttctggtggatttagagcaagcaggcactagttctgtgaagtcatactgtgattaagaggtggtctgtaccatccatgtggggtgtaagggtcagtggtacaagtcaaattggttatatctagctgtcccacagggaggtggtcaccagaatgcagtcgtgtaagaaatatatgtgagttgaccacatggaggaaatgggaggaggtggagaactagaaactgttaagtttgaataaagtttttttccgttatgagaaagttaaatccataaagaaaatgcatgctaaggtaacatataactataagaactcagtataagaggcaactctagaattaattaaattattgtatgtggagatgatgggtagtaaactgattattctcctgtagataaccatttgtcgctgctttttctgttaagtgttcaccacttgtatcattggctggcaatacctggtttgtcatagtttcacattaccttaaacagatgcccagactgggcatggtggctgacgcctgtaatcccagcactttgggaggctgaggcgggcggaacacccgaggtcaggagtttaagatcagcctgaccaatatggtgaaaccctgtcactactaaaagtacaaaattagtcaagcgtgatggtgcatggctgtaatcccagctacttggaaggctgaaacaggagaatcacgagaacctgggagatggaggttgcagtgagccgagatcacaccattgctctccagccttggcaacaagggcgaaactccattaaaaaaaaaaaaaaaaaaaaaaaaaaagattccctggtttcacaatttgctgttttccattggtctatctttccatctctctgataataccattttctcttaattagtataacgttcaaagctgtggtgtttagtgggtatattgcctgtctatcttagtcatcttgggctgctatatcaaattaccatagactgggtgacttaagggataaacatttatttctggcagttcttgaggttgtgaagtccatgttaagggagctggcagatctagtgtctggtaagggcccgcttcctggttttgcagatggtcatcttcttgtgtttcttcatgtgacagaggagaggaagccggctctcctgtgtcttcttataagagcactaatctcattcagaaaggatcgactcttatgctgtcatctaatcctaattacttttcagagatgtcaacttctaatactatattgggggtaggttattaatgtgtgatttttttggagtgatgcaaatattcatgccgtaacaccccccaaccatattctatagagcatcttggctattcttagtcattgtcttgtatttcggtttttagaagtagttttttcttaattttagtgaaaaaaacaaactgccttgtaaatttcatggactaaaatataactgtagtcatatttcagaaacgttacatcatagtgctatttaatctccttttaaggacacatgacattttttcatttatttcattttatattgatgtttttcagtgtagactttttgcataataatcattttatatccttcctgagacttttttggacttgaagaaaattagttttaatagaaattagtggctgggcatggtggctcatgcctgtaatcccaatatttgggaggctgaggtgggtggatcacctgaggtcaggagttcaagaccagcctgatgaacatggaaaaaccttgtctctactaaaaatacaaaattagccaggcctggtggcacatgcctgtaatcccagctacctgggaggctgaggcaggagaatcacttgaacctgggaggccaaggtggcggtgagccaagatcacgccattgcactccagcctgggcaacaagagtgaaactccatctcaaaaaaataaaaataaaaataaaaataaagagattattccagcatcggcaacatggcaaactttgcctatacaaaaaattacctcgtcactgtgatgtgtgcctgtagtcccagctactcaggaggctgaggtagaaggatctgttgagcctaagagttcgaggctgcagtgagctatgattgcaccgctacactccagcctgggcaacagaatgagaccctgtttgaaaaaaaaaaaaaaagagtcaggtgcggtagctcacgtctctaatcccagcactctgggaggccgaggcgggtggatcacaaggtcaggagatcgagaccatcctggctaacatggtgaatccccgcctctactaaaaatataaaaaattagccgagcgtggtggtgggcgcctgtagtcccagctactcgggaggctgaggcaggagaatggcatgaacccgggaggcggaggttgcagtgagccaagatggcgccactgcactccagcctgggtgagagagtgagactccatctcaaaaaaaaaaaaaaagaaaagaaaagaaaaaagaaaaaaattagtttcaatagagtgtgctcttttaaaaattatatttagcagactgttgctgataattataattcactgatagttatttctgtatagagtgtgcattctagaatcttactaaaaatattacatgtgcacaaaatacataaaagaattgcacaattaatccaaataatgatggagccagtattgggaataagataactgccttacatttttttatactttcacaacctgggtatgcatcctcatcagtatgttttatttttgcatgtttttcatgcaaatgataaccaatatgtgatatttcatattggattttattttaactcagttatgaaccttatatggaatgatagttaattcactttcttatttaatgggttttattatttagaacagtggttatttccccaaaacattgagcagataatccacagagttcccgcagttttcttccaggctcatagttcctcctggctttttttttttttttttttttttgagacagaatctcgctctgttgcccaggctggagggcagtggcatgatctcggctcacagcaacctccgtctcccgggttctagcaattcttctgcctcagcctccggagtagctgggaatacaggcacacaccaccacacccaactaatttttgtatttttagtagagagagggtttcaccatattgaccaggctggtctcgaactcctgacctcataattcacccacctcagccttccaaagtgctgggattacaggcgtgagccaccacgcccagcatagtttccactgttttaaacatcttgactggccaggtgctgagcctcatacctgtaatcctaccatttagggaggccaaagcaggaggatagcttggactcaggagttggaggccagcctaggcaacatagcaagaccctgtttcaaagaaaataattgttttaaaccaaaaaaaccatattgactttgtgtagtgtatcctacaacttatgcaagaacatattacatgtgaacatgatgaaaattgaagaagccaatgttattattacctaaagtccatcttttacattaggcttcactctttgtgttctgtggtttaagacaactacatgtgtcatgtatccaccatcacagtcttatacagaagcgtttcactgccctcaaaatcccctgtgctcctcctaattctatctctcccttccctcttttgccacccctatttatccctggcaacaaatggtgatgttcctgcctccgttttgcattttccagaatatcacatatttggaatgatgctgtaagtggccatttcagacttgcttctttcatgtaaaaatatgcattgaaggtctctcgatacctttgttgcttgacaactcacttattttttatttttctttctttatctaaagatttttgttttgtgagagacagggtctcaaactccccagctcaggtgatcctcctgcctgagcttcccaaatgcctggattccacttgtgagccaccatgtccggccactcattttctttcattactgagtaacattccattgtacagatgttaccatagtttgtttctttattcatctactgaaagactcatcttgagcctggtgtgatgcctcatccctgagttcccagcacacgggagactgaggtgagattgcttaaggccagaagttagagaacagcctggtagatacagtgtgagaacttatctatttttttttttaaagactcaccttgtttgattctagtttttggcagttatgagtaaggctgctaaaaacatttgtgggaggacttttgtgtggacatcagttttcagttcatttgagtcaatatgtaggaatgagactactgaatcagtaagaccatgcttattttcttcagagctccacagactgtcttccaaattggctgtagaattttccattcacatccctagtgaaggagagttcactgtctccagcatttggaagtgtcagtgttttggattttagctactccaccaggtatttgctggtgctttatttttgttttcctttttttttccctttggagacggagtttcgttcttgttgcccagactggagtaccatggtgtgattgagctcactgcagcctctgcctcccgggtttaagcgattctcctgactcagactcccaattaactgggattacaggtgtacgccgccatgcatggctgctgttcgtattattagtagagacagggtttcaccatgttgtccaggctggtctcaaacttttgacctcaggtgatccacccgcctcagcttcccaaagggctggattacaggcatgagccactgcacccggcctgttttcatttgctctttaataacatgtaatgtagggcatcctgtcatatgtttgtttgccataattacattctttagggggaggtatacttggaaagattgggctttttttttttttgagactgagtctggctctgtcacccaggctggagggcagtggcgtgatctcggctcactgcaacctctgtctcctgggttccagcgattctcctgcctcagcctcctgagtaactgggattacaggctcacgccaccaggcccagctaatttttgtatttttactagagacggggtttcaccatgttagtcaggctggtctcaaactcctgacttcggtgatccacccgtctctgcctcccaaagtgctgggattaaggcatgagccaccgtaaccggccttttgcttattttttgattggttggtttttttcttacagaattttaggagttctttataccttttgggtacaaatccttgatcagataggtgtcttgcaaatattttgtccctgtctgctgcctctctttttcttcttttaacaaagtcttttccaaaacatttttgttttgaatgaagtccaatttatcgattttctcattcacagatcatgctttttgtgttgtgtgtgaaaccttattgccaaatccaaggtcgtcttggttttctcagtgttacgttctagaaattgtgagttttgcattttccatttaagtaaatgattcattaggaagtagttttgtaaaaggtgcagttctgtgtctaattcatttctttgcatttgctaattcaggtgtttcaataccatttgttttgtgccaccatgcctaattttttactttattatggagacagggtctccttatgttgcccaggctggtcttgaactgaggggctcaaatgatctgtctgccttggcctctgggtttgcatttttagtacatgtctttatagtagatgtttctatgttcctagtgcctctcttgtcatcttatggaatcttctcttttatatttaatttattgagcatttttaatcatcaggagatattaacttatttatgctggaggttgcacttttttgaattgccgacgtgtgaaaaatcagactttggccatgaccttaagcagtaggatataaacaattcccacatgcttagcgttccaaaaagggaacactaggcataaattggttaaggcttgtcagatgccttttctgcctctattaggacattcttatggtgttttgtttgttttaagagtctcactctgttgccccggctggagtgcagtggcgtgatctcggctcactgcaacctctgcctcccaggttcaaatgattctcccatgtcagcctttcaagtaactgtgactataggcatgtgccaccatgcctggctaatttttgtgtttttttagagatggatttccaccatgttggccagagtggtctcaaactgccgacctcaagtgatccgcccaccttaacctcccaaagtgctgggattacaggcatgagccaccatgcctggctgctaccatgatttgttatcattacttatcttaaaacaaaatgtgaaacttatcagcttaagaaattttacatgtacagttgagatagtttgacagatctacataagttctctaagatgaattctattgtattttgcttttttcaattatcctgaggtttcatgcatgttgtagtataggccaagatgttattttcttttttttttttttttttttgaatcggagtttcactcttgttgcccaggctgaagtgcaatggtgcaatcttggctcaccgcaacctcctgcctcccgggttcaagcaattctcctgcctcagcctcctgagtaactaggtttacaggcatgtgccgccatgcccgggtaattttgtatttttagtagagacggcatttctccatgctggtcaggctgatctcaaactctgtccctcaggtgatctgcccgcctcagtcttccaaagtgctgggattacaggcgtcagccaccatgcccggctaagatgtcattttctaagagtaaataatatcccattttatatatatgcttaccacattttgtttttccatttagccatcagtggatatgtgggtggctgcattgctcattactgccacctcaggaaggtggtatagtggttaaatctgtgcttatgacacctgggtatctcttaagagtttcttgtttgccctcttgagtacatacagtgccaggtattttttaggaatgtcccctttgccctgtcagcatctatctagctacattctgacaggataactgcaaaatgaatgattcctgggcatcataatggaagtttctttctacctaggttattcccctcctctctgcttatatctagcatgcctgatttgggtggtccctgggggagtgtgatttcccaggggctccccctcctgctctttgctacctacatgcttcctctgacaatatcatcaaagattacactttgggaacaggcattttcaaggatacacagcctcaggactgctaatgttaactttttctgcatattaattcataggactctgtcatgacagatgctacagtccaaagacccacagtccaaagagacattagggacagcccaggcaactcacttttctccctgggttcggtaaatacatttcctatcctgctgtggctttagcccttgttcagttctagcatcacaattgctttatgaactagccaggtgtggtggcacatgcctgtggtctcaactactcaggaggctgaggcatgagaattgcatgaacccaggagtaagaggttgtagtgagccacgatggtgccactacactccagcctgggtaacagaacgagacgctgtcttaaaaaaaacaactgctggccaggcctggtggctcacgcctgtaatcccagcactttgggaggctgaggcaggcggatcacctgaggtcagcagcctgaccaacatggagaaaccccgtctccactaaaaatacaacattaaccaggcatggtggcacatgcctgtaatcttagctactcaggctgaggaagaagaagtggtagaaccccggcagtgagccgagatcacgccattgcactccagcctgggcaataagagtgaaaatctgtctcaaaaaaaagaattgctttatggaagaaagtaagtatacacagggagaaagagatctgatgacccttggagtccacggcatcctgagaacttcttgagaatagagtctaggcccccagtgctgtcactctcacccatcctcctctacacatgtgagatgtttcaggacccagtggcctttgatgatgttgctgtgaacttcacccaggaggagtgggctttgctggatatttcccagaggaaactctacaaggaagtgatgctggaaactttcaggaacctgacctctgtaggtaaggatgacatattccttccctcagtccattagtgaaccagtgtttctagctcatcaatgctgttgagtgatttagaacatagacaggaaatactttgatgaataaatgaggtatggctgcagtaaatcatgggcatagaatctaataattttttcacaattttatactgcctcaggactatttttctgtgtctatattttaggaaaaagttggaaagaccagaacattgaatatgagtaccaaaaccccaggagaaacttcaggtaatttgtacttacaagacaaagcagtgtctctctagacaatcttagaatatgacaatatattaaaaataagtaaaagaactaagtccaggatcaaatacatttatttttagaatatttgatcaaaaaacatatatataaatgtgacctaggctgtgggctcactcctgtaatcccaatcctttgagaagtggagataggaggatagcttgaggccagcagttcaagaacagcctgggcaacataacgagaccacatatcaacaacagcaaaaaattagctgggcattgtggtctgtagtcccagctactcaggaggctgaggcaggaggatcacttgagccagtaaaggctgcagtaagctatgatgatatcactgcactccagtgtgggcaacaggacgagacccctaaataaaagaaaaatgacacagagtatttagtatttgtaaaatagtttacatgggaagagtattaagaagccccatataaacagttttttaaataatagttatggctgggtcaccttgtacaatgggttgtccagtcaccttcaaacaattcagacagggcagaaagcctacactttgatggacagtgttaaaaatgcaagttcagtacttgttgattaatataaaattacttataaacaaaccctttgtaatgtgcttctcatttttgacaggagtctcatagaaaagaaagtcaatgaaattaaagatgacagtcattgtggagaaacttttacccaggttccagatgacaggctgaacttccaggagaagaaagcttctcctgaaataaaatcatgtgacagctttgtgtgtggagaagttggcctaggtaactcatcttttaatatgaacatcagaggtgacattggacacaaggcctatgagtatcaggaatatggaccgaagccatgtaagtgtcaacaacctaaaaaagccttcagatatcacccctcctttagaacaccacaaagggatcacactggagagaaaccctatgcttgtaaagaatgtggaaaaacttttatttcccattcaagcattcaaagacacgtggtaatgcacagtggggatggaccttataaatgtaaattttgtgggaaagccttccattgtctcagtttatatcttatccatgaaagaattcacactggagagaaaccatatgaatgtaaacaatgtggtaaatcctttagttattctgctacccttcgaatacacgaaagaactcacactggagaaaagccttatgaatgtcagcaatgtgggaaagcatttcatagtcccagatgctatcgtagacatgaaaggattcacacgggagagaaggcttatcaatgtaaggaatgtggaaaagcattcacgtgtccccagtatgttcgtatacatgaaaggacccactctaggaaaaaaccctatgaatgtacgcagtgtgggaaagcattatcctctcttacaagttttcaaacacacataagaatgcactctggagaaagaccttatgaatgtaagatatgtgggaaaggcttttgttctgccaattcatttcaaagacatgaaaaaactcacagtggagagaaaccctataaatgcaagcaatgtggtaaagccttcattcattccagttcccttcgttatcatgaaaggattcacactggagagaaaccctatgagtgtaagcaatgtgggaaggccttcagatcttcctcacaccttcaattgcatggtaggactcacactggagagaagccctatgaatgtcaggaatgtgggaaagccttcagatctatgaagaaccttcaaagtcatgaaaggacacaaacacacgtaagaatacactctggagaaagaccttataaatgtaagctatgtgggaaaggcttttattgtcccaaatcattgcaaagacatgaaaaaactcacactggagagaaactctatgaatgcaagcaatgtggtgaagccttcagtagttccagttcctttcgataccatgaaaggactcacactggagagaaaccctataaatgcaagcaatgtgggaaagccttcagagctgcctcagtccttcgaatgcatggtaggactcaccctgaagataaaccctatgagtgtaagcaatgagggaaagccttcagatctgcctcacacctttgaatgcatggtaggacacacaatcaagagaaaccatgaatgtaaagaatgtgggaaacccttcaggtctgcccagaaccttcgaattcagtaaaggacacaagcacacataagaatgcattctggatagctgaacaaaaggcagcagaaacttctgcagacttaaatgtccctgtctgacagctttgaagagagtagcagtcctcccagcatggagtttgagatctaagaatggacagtctgcctcctcaagtgggtccctgatctccaagtagcctaactgggaggcacttcccagtaggggccaactgacacctcatacggccgtgtgcccctctgtgacgaagcttccagaggaaggatcaggcaacaacatttgccgttctgcaatatttgctgttctgcagcccctgctggtgatacccaggcaaacagggtctggagtggacctcaagcaaaatccaacagacctcagctgagggtcctgactgttagaaggaaaactaacaaacagaaaggacaaccacaccaaaacccatctgtacatcaccatcatcaaagaccaaaagtagataaaaccacaaagatggggagaaaccagagcagaaaagctgaaaattctaaacatcagagcgcctcttctcctccaaaggaacgcagctcctcgccagcaatggaacaaagctggactttgactttgacgagctgagagaagaaggcttcagatgatcggtaataacaaacttctccaagctaaaggaggatgttcgaacccatcacaaagaagctaaaaaccttgaaaaaagattagacaaaatggctaactagaataaacagtgtagagaagaccttaaatgacccgatggagctgaaaaccatggcacgagaactatgtgatgcatgcacaagcttcagtagctgattcaatcaagtggaagaaaaggtatcagtaattgaagatcaaatggatgaaatgaagtgagaagagaagtttagagaaaaaagagtaaaaagaaatgaaaaagcctccaagaaatatgggactatgtgaaaagaccaaatctatgtctgattggtgtacctgaaagtgacagggatggaaccaagttgggaaacactcttcaggatattattcaggagaacttccccaacctagcaaggcagaccaacattcaaattcaggaaatacagagaacgccacaaagatactcctcgagaggagcaactccaagacacataattgtcagattcaccaaagttgaaatgaaggaaaaaatgttaagggcagccagagagaaaggtcgggttacccacaaagggaagcccgtcagactaacagcggatctcttggcagaaactctacaagccagaaaagagtgggggccaatattcaacattcttaaaggaaagaattttcaacccagaatttcatatccagccatactaagcttcataagtgaaggagaaataaaatcctttacagattcaaatgctgagagattttgtcaccaccaggcctgctgtaaaagatctcctgaaggaagcactaaacatggaaaggaacaaccggtaccagccactgcaaaaacatgccaaattgtaaagaccattgaggctaggaagaaactgtatcaactaacgagcaaaataaccagttaacatcataatgactggatcaaattcacacataacaatattaaccttcaatgtaaatgggctaaatgctccaattaaaagacacagactggcaaattggataaagaatcaagacccatcagtgtgctgtattcaggagacccatctcacgtgcagagacatacataggctcaaaataaagggatggaggaagatctaccaagcaaatggaaaacaaacaaaaaaagcaggggttgcaatcctagtctctgataaaacagactttaaaccaacaaagatcaaaagagacaaggccattacataaaggtaaagggatcaattcaacaagaagagctaactatcctaaatatttatgcacccaatacaggagcactgagatgcataaagcaagtccttagagacctacaaagagacttagactcccacacaataataatgggagactttaacatcccactgtcaacattagacagatcaatgagacagaaagttaacaaggatatacaggaattgaactcagctctgcaccaagaggacctaatagacatctacagaactctccaccccaaatcaacagaatatacattcttctcagcaccacatcacacttattccaaaattgaccacatagttggaagtaaagcactcctcagcaaatgtagaagaatagaaattataacaaactgtctctcggaccacagagcaatcaaactagaactcaggattaagaaactcactctaaaccactcaaatacatggaaactgaacaacctgctcctgaatgactactgggtacataacaaatgaaggcagaaataaagatgttctttgaaaccaatgagaacaaagacacaacataccagaatctctgggacacatttaaagcagtttgtagagggaaatttatagcactaaatgcccacaggagaaagcaggaaagatgtaaaattgacaccctaacatcacaattaaaagaactagagaggcaagagcaaacacattcaaaagctagcagaaggcaagaaataactaagatcagagcagaactgaaggagacagagacagaaaaaacccttcaaaaaatcagtgaatccaggagctgtttttttgaaaagatcaacaaaattgatagaccgccagcaagactaataaagaagaaaagagagaagaatcaaatagatgcaataaaaaatgataaaggggatatcaccaccgatcccacagaaatacaaactaccatcagagagtactataaatacctctatggaaataaactagaaaatctagaagaaatggataaattcctggacacatacaccctcccaagactaaaccaggaagaagtcgaatccctgaatagaccaataacaggctctgaaattgaggcaataattaatagactaccaaccaaaaaaagtcaaggaccagatggattcacagctgaattctaccagaggtacaaagaggagctagtaccattccttcttaaactattccaatcaatagaaaaagagggaatcctccctaactcattttatgaggccagcaacatcctgataccaaagcctggcagagacacaacaaaaagaattttagaccaatatacctgatgaacatcgatgcaaaaatcctcaataaaatactggcaaaccaaatccagcagcacatcaaaaagcttatccaccacgatcaagttggcttcatccctgggatgcaaggctgattcaacatatgcaaagcaataaacgtaatccatcatataaacagaaccaaagacaaaaaccacaagattatctgaatagatgcagaaaaggccttcgacaaaattccacagccctttatgctaaaaactctcaataaactgggtattgatgggatgtatctcaaaataataagagctatttatgacaaacctacagtcaatatcatatactgaatgggcaaaaactggaagcattccctttgaaaactggcacaagacagggatgccctctctcaccactcctattcaacatagtgttggaagttctggccagggcaatcaggaaggacaaagaactaaagggtattcaagtaggaaaagaggaagtcaaattgtccctgtttgcagatgacatgattgtatatttagaaaaccctatcatctcagcccaaaatctccttaagctgataagcaacttcagcaaagtctcaggatacaaaatcaatgtgcaaaaatcacaagcattcctatacaccaacaacagacaaacagagagccaaatcatgagtgaactcccattcacaattgcttcaaagagaataaaatacctaggaatccaacttacaagggatgtgaaggacctcttcaaagagaactacaaaccactgctcaacgaaatcaaagaggacacaaacaaatggaagaacattccatgctcgtggataggaagaatcaatatcatgaaaatggccatactgcccaaggtaatttgtagattccatgccatccccatcaagctaccgatgactttcttcacagaattggaaaaaactactttaaagttcatatggaaccaaagaagagcccacattgccaagacaatcctaagccaaaagaacaaagctcaaggcattaggctacctgacttcaaactatactacaaggctacagtaaccaaaacagcatggtactggtaccaaacagagatatagaccaatggaacagaatagagccctcagaaataataccacacatctacaaccatctgatctttgacaaacctgataaaaacaagaaatggggaaaggattccctatttaataaatggtgctgggaaaactggctagccgtatgtagaaagctgaaactggatcccttccttacaccttatacaaaaattaaattccagatggattaaagacttaaatgttagacctaaaaccataaaaaccctagaagaaaacctaggcagtaacattcaggacataggcatgggcaaggacttcatgattaaaacaccaaaagcaatggcaacaaatgccaaaattgacaaatgggatctaattaaactaaggagcttctgcacagcaaaagaaactaccatcagagtgaacaggcaacctacagaatgggagaaaatttttacaatctacccatctgacaaagggctaatatccagaatctacaaagaacttaaacaaatttacaagaaaaaatcaaacaaccccgtcaaaaagtgggcaaaggatatgaacagacatttctcaaaagaagacatttatgcagccaacagacacatgaaaaaatgctcaccatcactggccatcagagaaatgcaaatcaaaaccacaatgaaataccatctcacaccagttagaatggcaatcattaaaaagtcaggaaacaacaggtgctagagaggatgtggagaaataggaacacttttacactgttggtgggactgtaaactagttcaaccattgtggaagacagtgtggtgattcctcaagaatctagacctagaaataccatttgacccagccatcccattactgggtatatacccaaaggattataaatcatgctgctataaagacacatgcacacgtatgtttattgtggcactattcacaatagcaaagacttggaaccaaaccaaatgtccatcaatgataggctagattaagaaaacgtggcacatatacaccatggaatactatgcagccataaaaaatgatgagttcatgtcctttgtagggacatggatgaagctggaaaccatcattctgagcaaactataacaaggacagaaaaccaacactgcatattctcactcataggagagaactgaacaatgagaacacttggacacagggagggaaacatcacacaccagggcctgtcatggggtagggggaggggagagatagcactgggagatatacctaatatgaatgacaagttaatgggtacagcacaccaacatggcacgtgtatacatatgtaacaaacctgcacattgtgcacatgtaccctagaacttaaagtataataataataataataaaagaatgcactctgtagaaagaccttataaatgtaagatatgtgggaaaggcttttattctgccaagtcatttcaaatacatgaaaaatcttacactggagagaaaccctatgagtgtaagcaatgtggtaaagcctttgtttctttcacttcctttccatatcatgaaaggactcacactggagagaaaccctatgagtgtaagcaatgtggaaaagccttcagatctacctcacacctttgaaaacatggtaggactcacactggagagaaaccctatgaatgtaagcaatgtgggaaagccttcagatctgtcaaaaattgttgaattcatgaaaggacacacactggagagaaaccctgtgaatgtaagaaatgtgggaaagcgttccataatttctcttctttgcaaatacatgaaaggatgcacagaggagagaagctctgtgaatgtaagcattgtgggaaagcattcatacctgccaagatcctttgaatacatgcaagaacacacaatggagagaaaccctatgaatgtaaagaatgcagaaaagcattcagcttgcctacttcctttcatagacatgaaaagacattggaaggaaaccctatgaaggcaagcaatgtggcaaagctttcacttcttccagttcttttcaatatcatgaaagaattcacactggggagaaaccctatcagtgtaagcaatgtgcgaaagcctttatttcttccacttcttttcaatatcatgaaaggactcacatgggagagaaaccctatgagtgtatgccatgtgggaaagccttcatttttctagttgctttcgatgtcatgaaaggactcacactggagagaagccctatgaatgtaagcaatgcaggaaagccttcagatcagcctcacaccttcaaatgtatggaaggactcacactggagagaaaccctatgaatgtaagcagtatgggaaagcattcagacctgacaagattctttgaatacagataatgaatgtaaacaattaactgtttgtaataactgtatactaacaaatgttatctttaaataattaagaagctataatagtaaggccgggtgcggtggcttatgcccgtaatcccaccagtttgggaggccaaggcagatcacgaggccaggagatcgagaccatcctggttaacatggtgaaaccctgtctctactaaaaatacaaaaaattagccaggcgtggtggtgggtgcctgcagtcccagctactcggcaggctgaggcaggagaatggcatgaatccaggaggcagagcttgcagtgagccaagattgcgccactgcactccagtctgggcgacagagtgaggctccgtttcaaaaaaaaaagctataataaaatatcccattggtgtcatgtattagatcaaccttatactgttaaattgttattatttggacattgtgagtcagtataaccatgtggataaaatgccaggcatcttttttttttcggaaattttacttttcatgcttatgtacttacatttttatctcaaccctaatttttcttatctttttttttttccagaaaaaaatctcactctgtcacccaggctggagtgcagtggcatgatctcaggtcgctgcaacctctgcctccagggttcaagcaactctcctgcttcagcctcctgagtagctgggactacaggcatgcaccaccacgccaggctaattttttgtattttttagtagagacagggtttcaccatattggccaggctggtcttgaactccagacctcatgattcgcctgcctcggcctcccaaaatgctgggattacagatatgagccatcatgcccagccgcaaccctaatttttcattcagtcataataccaacagttatctcatgtacctctgagtgccttcttcccaaaagccagcagtaccatacctgctgtcagcaagtgtgtaatataccatagtgataaatatgaccaaaagccataaatgactgtgagatgtatgagaatgacacgtcacattagtaagaagagaaaaattttggccatgtttatgatttgaaatatgttttcctctatcacatttagaaatatagttacaaaatgcccttagttttatcctgattcatcatggtcactgaggagcatcgtctcatatgcctggtatgtgacatgtgtctcttcaacagtaaaagacttggcattggctgggcatggtggctcacgcctgtaatcccagcactttgggaggccgaggtcaggagttagagaccattctgaccaatatgatcaaaccccgtctctactaaaaatacaaaaattagcggggtgtggtggcatgctcctgtaatcctagctattcaggaggctgacgcaggagacttgcttgaatataggaggcagacgttgcagtgagccgaggtcacaccattcactccagcctgggcaacaagagcgaaactccgtttcaaaaaaaaaaaaaatgacttggacttgtggtgaggggaggtcatctgtagactcctggacctgtttttgccttacttattctctaaagactgaaatatttcctaaaatgtatgggcactgtttaccagaaagtaccttagttaaaacataaaatcatttatgccttataaagctatattttttcaattgctttactgagtcataggaggctaataaatttgtgtaaattgtctaaatacaagcctgtctttctctgataatgtgctgctgaggctaacttgtcaacagcctgcttatctcagcagtgtaaagttaacagcaacatggaaaagtttcttttatatattatgcaacggcttagaacaattcagtcacttcctttaaggtaccaatgaagctgctcttcagaaacgcttatttaaaactccctaagatcaaaatccaggcaccacaagatgcagcatcagccactgaccaaaccctgtctgtgtgtggaggtgacacacccagtcccagataatgtatccacatcagtgaagggtggagtcgttgattgtcagatcacacaaagtgactcagagcagggaagacagggcagtgaaacctggccaggcacagtggctcatacctgtaatcccaccactttgctagtccaaagcgggtggatcacttgaggtcaggaattcaagacaagcctgaccaacatggtgaaaccctgtctctactaaaaatacaaaaactagctgggcatcgtggtgtgtgcctgtaatcccagctaatcaggatgctgaggcaggagaatggcttgagcctggagacagaggttacagtgaactgagatcacaccattgcaccctgcagcctagtcgacacagcgagactctgtctccagaagaaaaaaagaaagagttggatgcacctgaattcaacccctgcctcatccttctcccttgaaggccaaatacaccctgatacttttcaccaaagagtagaaacaacaccattcacttgaccccaaatgtgactttccacaggatgcaagcacagtgttggaatggccaatgacaatgacaatgaaagtgcaggctgagggtgatgaacaggacacactggagagcctgacattggcctagactatgggggtgtcttgatgcttcacaaagagcccaaggagcaccccaaagaggacactggagcacaggcccaaagggtgttcatatgccaggaaggccactaattttggaagtcagtgacattggtgcctgcttgagtcctgatcctacaaagagtgaccattgaaagctcacaccaggtggggtggctcacgcctgtaatcccagcactttgggaggccgaggtgggtggatcatctgaggttgggagtttgagaccaaccaggccagcatggcaaaactccatctctactaaaaatacaaaaagtagctgggtgtagtggctcacgcctgtaatcccagccagttgggaggctgaggcacgagagtagcttaaactcacaaggcggaggttgcagtgtgctgagatcgcgccattgcacttcagcctgggtgacagagcgagactctgtctccaaaaaagaaaaaaaaagctcacttggttcttcccctgatgcccccactgcaggtgtaccaggtgtaccagctactcacattgaccattggaggagccctttatactgagagaacctcagagccccggaaagctagggatccacaggcagatgcagtactcagtgatgccctctgcaagtgatagtttttgtcttggggctttttccagacattctagtgaaacaaatgtgggtttaggtaagaaataacttttaattctagaccttgaagccagcttgtcattaaaacagttcataacaaaaaagtctaggtactgaacttgtaagtaaaaatagaaatattaaataaatatcttaaaagatattaaataaatacataaaatgtgcttgtatataggcttagaaggggtcagtcaaaaattcaggggccgctgggcagattggctcatgcctgtaatcccagcactttgggaggctgaggcaggcagatcacttgaggtcaggagttcaagaccaccctggccagcatggtgaaacaccatctctatgaaaaatataaaaattagctgggtgtggtggcacacacctgtaacaccagctactctggtgactgaggcatgagaatcacttgaaccagggaggcggaggttgcagtgagccaagatcatgctactgcactccagcctgggctacagaacaagactgtctcaaaaaaagaaaaaagttcagggacctggaggaaggagagaaactgaagcatgctttggtagatagatatttcattttgactaaagatcactaaagagaaaactgttcacctaatggtttgtgaggtaaatactggaatatctagtgggtgtctggtttgtcataggtaacaaacgtagcaccatctaagtcatcatgggaagcttgtttcattgtagtaaggtgctcttgcacaacacaaaggatgggggatttcatgaatcacagccattttcaggattgcccacccacccccatctcctttccacaccccttactctttttctatccatgtctttgatttgactcgtcctgagttgtatccttcatagtaagtgggtaaatgtaagtgaactgtgggtagttctatcaaattatggaacttgagtaaggtgttgtacaggacccaggtctagatgcagttgctgagaagtacaggtggcccctggggctttgacttgcatctgccaagtggggctgtgttgggtgagccaggaactcatggagtctctgctaactctgggtggcttctgaattgcatggttacataactgcttagtgctggagaattgattggtgttcagcaagcaccacacatttgatgtcaggcaaaaagacagcataggtcagaaccttccactgactcacagtgagcgagtggtctttggtgggcattgagaccctggtggaaggactgtgtccacactgtggggaggggccagcagggtgtgtgtggaattcccagaagtaattttctgactgctcacatttccttcacacactacctaggagtgggccagcctggcctgtgtctccacggtccaagtggttcctaagcttgaaaatgtgtaactattggagtgtgggtttccttgtgagctgtgggtgaggcaggctgcctacctgagctgcctcccttttgtttttttacagaatcttgctgccatggaattgctctttccccacgcatctgagaatttatttatttgtttgtttgtctatttttcagatagaatctcactctgtggccaaggctggatcagtggcgtgatctcggctcactgcaacttgcctcccagattctcctggctcagcctcctgggtagccgggactgctggcacaagccaccacaccctgcttttttttttttttttttgagacagtcttgctctgtcacccaggctggagtgcagtggcaggatctcggctcactgcaacctttgtctcctgggctcaagcaactgtcctacctcagcctcctgagtagctgggattataggcacctgcaaccacactcagctaatttttgcatttttagtagagacggtttcaccatgttgtccaggctggtctcgaactcctgacctcaggtgatccacccgcctcggcctcccaaagtgctgagattacaggcatgagccaccatgcccagcctatctcttgatcttattgacaatgcttttcttgtttttattcctaactggaaatacaacacaaagttttacacattgggaaataattgctgggttgtagattatgggtaaattcaaatttactaggaaatgtcagtacagtatgaatgtaacttatgaattaaccatctcacctttcatgcacgtgcctttattcttgtgatttgccaacactttgaattatctaactcacttttcgtcgcccatttactcttaaacagaatctctgtgtgattatttattgctttttatttgttgccattggttgagcatttttcttatataatctttcatcttctgtgtagcagtatccagtcatcctcttacatttgactaatttgtagttatctctctttttctcctcgttttcttttattttaatttgagacatccttgctctgtagcccagctggagtgcagtgttctggtcactcactgcagcatcaagctcctgggcttgagcaatcctcccacctcggctttctgcccagctaattttcaaaaattttttgtagagacaagggtgtcacggttttgcccaggctggtctcgaactcccgggctcaatcaatcctcttgcctcggcctcccaaagtgctaggattgcagacatgatccaccatgctcagcaattagggttttttttttaaaaccaagatatctgtacatgtttctgacaaatattttatttaaaatctttaacaactgcatactaaccaaggttattctgtttttcattttctgttttccattttcattatgattacttgtttttcttttttttttttttgagacggagtctcgctgtgtcgcccaggctggagtgcagtggtgcgatctccgctcactgcaacctccgcctcccgggttcacgccattctcctgcctcagcctcctgagtagctgggactacaggcgcccgccaccacgcccggctaattttttgtatttttagtagagacggggtttcatcgtgttagccaggatggtctcaatctcctgccctcgtgatccgcctaccttggcctcccaaagtgctgggattacaggcgtgagccaccgcgcctggccccttgtttttcttttttattctcattttttcctagataattacaatacttttccatgtagtggctctggcagcattttcatccttcatgcaatcatacagctacctcgatgtcccttctctctgccattctgaaattagacctcactcctttgtgactcttgctccccatctgctatgtgataaagtcctgtctgattacatcgtctccaaagcctctttttgggcttctgtttaccccttggcgtgtcttgtatttactctcctcaaaatatatacttggaggccaggtgtggtggctcactcctgtaatcccagtatttgggaggccgaggcatgaggatcccttgagcccaggagtttaaaaccagcctgggccacacagggagaccctgtctcaaaaacaaaacttatacttgcaagccctaaaccccaacatggtcatatttggacacgaaccctttaggagatcacatacatttataaaggagggctctcacaatgggatgagtaagaagagagagagaactctgtctctccagcatgtgaggacacagcaagaagtcatctagctgcaagccaggaagacactcttcactaggaacaaaattgctggcagcaagatgttggactcccgaagctccagaactgtgagaaaaaaattctgctgtttaagaaactgagtccatggtattttgttataccagcctcagctaagtcatcccaagagtcctcacataaatcatatactatcgtatatgatatcgtgctgcatttggatctacctggaatgtctccaaatcttctacttttcctcttggacccattgtgagaataggtgtgcttcataggcaactactggtgatagtagtgatagcccataacgacttgggacaaaaaaggaacttttacttttttttttttttttttcttcctgagatggagtttgtgctctgttgtccaggctggagtgcaatggcgtgatctcagctcactgcaacttctgcctcctgggttcaagcgattctactgcctctgcctccagaatagccaggatcacaggtgtgcactaccatgtccggataatttttgtattggtagttagagacaaggtttcaccatgttggccaggctggtcttgaactcttgatatcaggtgatccactcactttggcctcccaaagttcttggattacaggcgtgagctactatgctcgccctgttttatgtatataaatatgtgtgtgtgtatttctctttttaataaaatagagactagttctcactatgttgcccaaggtggtcataggccaaacttttgggctcaagcaatctacctgcctcgaccactcaacgtgctgggattaaggcatgggaaactgtgccaggccaaatgaaagagacttagtgggaggctgggcgcggtggttcacacctgtaatcccagcactttgggaggctgaggggggtgcatcacctgagctcaggagttcaagaccagcctggacaacgtggtgaaaccgcatctctaccaaaaatacaaaaaattagccgggcatggtagtcccattctcacagtcacagaaaggttctttcttaaggattccacctgctggaaagcattatatactaccagaacttgttcaattcaagagtgtctggtctcatctccatgtcataattacaaccaaaatcctaaagggactgatttaccacactgtgggtgccataaggcccaatttttaccctcagcagcagctgtaacatcccaagttacagctctaccctccaaagatgtgcctgaggcttgtgcctgccatactaacatgttaatatgtccaaagcttcctgcagagctgtgtcccagtcccaaagtgcccctttctaataagtctatatattggtctcaaacattggactcagtgtcagataaatgctctccaataatccaaagactaacaaatgtctggatttcttttctccttttttttttctttaagaaacatagtatggctctgtttcccaggctagagtgcagtggtgggatcatagctcactgcagaaactcctaggcccaagggattctcctgcctcagcctcccaagtagctgggaataaaggcacatgccactatgcccggctgtttttaaattttttgtgcagatggagtctcactatattgcccaggctgttcttgaactccaaggctcaagtgatccccctacctcagcctcccaaagtgctgagattacagtcatgaaccaatgctcccagccctgaaatggaaaatttcttttgtttgtttgtttgtttgtttgtttgttttttgagacagagtctcactctgtcatccaggctggagtgcagtggcataatctcggctcactgcaaccttccaactcccgggttcaagcgattctctgcctcagcctcctgagtagctgggattacaggcacctgccactacgcccagctaatttttgtatttttagtagagacagggtttcaccatcttggccaggctagtcttgaactcctgacctcaggtgatccacctgcctcgacctcccaaagtgctgggattacaggcatgagccactgcgcccggccctgaaatggaaatatttcaaagggaaaacatctaacgttcaagttattatctatagagcagttaacaggaactatcatttagggtccatcgtgaggcagaaatttaaaaataataagtactgaatttatttactccaagaaaagtaaaagctaaggcccagagtgtggcaaggcaagggttaaaaagaaaaaagaaaagcacaagttttcctctgcctagcagctcacttccaggaccttatcaagaagataacgatgtccaaatagccaaggccaaaggaatgggctccagacacccctcccttccagagcaatgttgaaggaaaaaaaaaaaagagacagattcttttactgttactcttttgcaagtcttcttaagcattattatgttttacaaatgtctgtatttagccagttcttgtttttctttcaatgcagctacaaggacactggctatgcaaggtcataaattatgttatgctatagattacatgacctgtcactgtatgattaactgcttttgtttggcatctgtaagacagcgtataaaaaccccactttgtcttcgttcagtcctcagctttttggatatgaatcgtctgagccagtgcgtacctaaaatataaacaaatcctcctgtactccatattggtctctccttcctcagtttaccacaacaatgggattctaggacactaggtatgaagcaaatatgaggaagttcagggaacaagctgacttaatgattaatgctgaaggttctgcagcttggtttaagttttctcctcccatcctccctgatgaatttgataaagtttaaagggatggtttcaccaggggccttttccattgactgcaaggaggtcatccgcctggtaaatcctcagtaggccaagcctcttatgtggccagaatgatccagtccataaggaaataccacctgctgtgttttacaattagaccatccaagggggtcagggtttccccggggagtctggtgggctttttatgggtttttttgtttttgattttttttttttttgagacagtgtcttgctgaagttcagtaacctgatcacagctcacagcagcctcaaactttggggctcaagtgatcctcctgcctcagcctcctgagtagctgtgattacaggtacacaccacctctcctggctaattaaaaaatagatttatggagatgggagtgtctcacttcactgctcagggtggtcttcaacttcgggcttcaagtgatcctgccactttggcctcccaaaatgttgggattgcaggcatgagccatggcacctggcctcccaggctgttgttgaaaggtctttgcaatctctaagagttctgcagcagtttattccctgacagcgagagtctcatcctttgatcccattttgcagcagtagttgggtgttcacttttctttccataaggaagcaagcttgccagtgaccctcatccccctcctcatcgatgacttctttgtcatcagagccttcctcttcataaattcccacggaatccaagttttcacgtcccgattgggcttagttatgatagctactggctcacacaagctgcaacagcaccccgtcccatggaagccacccgactctctcctccctgagtttcctgtcctgggagcccccatctctgctctcccgggctccgggccctagagccgcactgctgcagagcccagttcccagggcagctccctccacctatccacatccatctccagctctccaccctctctcccaccagcctggcctggaggtgctgcagtgtcattgactgcgagtccctcagctgccacctccaccgcgatctggaagtctttcaaatgcccttaagttatcttagatttttcctcccccactttatacataagcataggaggagagcagggactctgctggtgtcttatttacacaatgggattgaaggtgtttgtctcgcgaaactaatcgatggggtgagaagtagctgaataacctgcagggggcagcagagcccaaggccagtgattccacgttgaggacagtctctgcagcctgcaaagggagggaaagagagtttccctgggggcttcgcgggcagcccacccccttctacaagtggcctccagctgctcagagcagctccagaaagggtgtggattccgagaagctgcagagccctggaaagcagaagacccatgtgcagacgcatttgtggcgtctctgtcctttctggtgttgtacctctggagctgtcttctgggcagggtttggggtttgacatgcatggggtcgttggggtcagagttatttgtatagataaagaaaatgtgtggccgggcgcggtggctcacgcctgtaatcccagcactttgcggggccgaggcgggcggatcaagaggtcagaagatcgagaccatcctggctaacacggtgaaaccccgtctccactgaaaatacaaaatattagccgggcgtggtggcgggcgcctttaatcccagctactccggaggccgaggtaagagaatggcgtgaactcgggaggcggagcttgcagtgagtcgagatcgcaccactgcactccagcctgggctacagagcaagactccgtctcaaaaaaaaaaaaaaaaaaagaaagaaagaaaagaaaatgtgtgaagatcaggctagagctagagacagaattgtttggtggcgtcacctggataaagggttcatgaagttgacagtttacttaggtcagaaacaaaacctggtgagagtttcctgctggtgaaaatgaagatctgaaaggaggaagcattttcacaaggggatgggggtgtgtgagcaaggcttggccacgcctcatccccaattccggcccgctcgaggacatatgcctctcctcctggtgcagtcgtgcctggcctggtctcggttcccctgctgctctgaggccagcagttggctcctatggacactgagtctgaaattccctgcacactcctgtgaccccgtgcagaacgaaggagcggggactgtcccttgagtgaggatgacgctagtgttctcttctatcaatagcaagtttggctgaaatgcaaatatccaataaccagagtgcagaaagcagctcgcccttagagaagctgtggctagaatccgtcagtctggctctgcggggcctgatacccagggcttcagctgtcactcagatgtggggggcgggacctagtatttcatccaatcagaggtgctggggcgtggcactgcccacagttcatccggaaatggagggggtcgctttcctcaccttcctcgctgcgcgggcggcggttggtaaccggtcagaccagcccgagagggacctggtgcctgtacccaggcttctgtcgctctgtcgcctgcgctatgccctgctgtagtcacaggagctgtagagaggaccccggtacatctgaaagccgggaaatggtgcgtgtgcgggaccagatgtcgtgagacgggggaggggctgcctggaacaggcgggaaccggctgtggcgggacccgggcctccctgtgggcgactccggggtctgggaccgagtcctccttgagcagttcggccctcggtccccttggccgctggacggggctgggccagcagccaggacccgggcgtcctgtcccgtccctgcgcggcgactgcggccgcggcccctgccccggagccctctctgggcagttccgctcccgcagccccgcgtctccccagattgtgcggaagcaacgggagggtcatggaggcatcctgactcgggtgtggggttcgtgcgtgggaggagcagtggtctgtggggcccccagtccccactttctcctgttaaaaattaaactgaggtacgttaacaattaaagagttcatttgagcaaacagcgattcacgaatgagaaacaccccgtcctgggttgtggtttgtcaacggaaaaagccaaactatgtaaaataaagaagtttattcagagccgaataggagagaccttggccgagggaaacacaaccccaagcagcctggagtaagtggtcccgaggcggctcaagacagtttggttttattcatttcagagagacaggaattgcagggaaaatgatgaatcagtgcctgaaaggtgtaagttccattggcagaaagggtgggacctgtggaaggggggttagaaggcacaggtggttgagggattctgtaggtggcagctggttgagagtgtgaagtttgtctaaagtttggaggaggtaggaaggaagggggtctgttatctgccacttgattccatcccagccagaaaacagacctgtttctctagattttatgaattctgaggcgtgactttacttttgccttgcgtggccttaggttttgtttgtaagttagtatcttcttgccacaagcagtctgtttttccattctatctatttttacatgaatgtgtgggagagggtataaggagacctgtctcacctcccatcctgtcatacagaggcactcaattttcagggttttttgcgggtcctgttggccaagagccggtcacttcacttagctggaaaggtactttgtttttatttgagacggagtctcctgtcgcccagactggagtgcaatggcctgatctcggctcactgcaacctccaccttccgggttcaagtgattctcctgcctcagcctcctgagtagctgggattgcaggcatgcaccactatgccctcctaatttttgtatttttagtagagatggggtttcaccatgttggccaggctggtctcgaactcctgacctcaagtgatccacccacctcagcctcccaaagtgctgggattacagatgtgagccatctcgccgggccagaggtatgtttttatttttagtttaccagtttaggggtaagcttttataagttacgtgaggagacaaaccagataaatgcttgattggttgcagagatgcagttgccttatttggacttgtcactccgaaataatagaaaggtcaagatttcagttggaagagtttattcaagcggaaggatagcagtggcccatttgggaaaaacacagactctagggaaatagactcagtactccaaaactggaagttaagttcttgcttgtattaccaggaaaagaggtcctgatcagaccccaggagagttcttgaatctcacacaggaaggaattcaagacgagtcacaaagtgcagtgagaagagagtttattgaaagctactctgggccagcatgatggcttaggcctgtaatccaagcactttgggaggccaaggtgggaggataacttgaggtcaggagttcgagaccagcctgggcaacatagtgaaaccccatctcttccaaaactagcaaaaattagccgggtgtggtggcctgcacctgtagtcccaggtgttcaggaggctgatgtgagagaatcacttgaaccccagaggcagaggttgcagcccagccgaggatgtaccactgcactccagtgtgggtaacagagtgagaccccatctcaaaaaccaaaacaaacaggaaagaggtcaagaccaacctggccaacacagcgagaccctgtctctatttaaataaataaataaataaataaataaataaataaataaatagaaaaggaaaaagaaagaaaaagcttctctgtttcagagtagggcatcctcatacagcaagtggaggaacgtactgtctttaagtttttcttatgtagggatcttttctatgtaaagaataaactacctgtgcctatgtgcatgtgggctgacagcatcacaaaatttattactctgttgatttaaagaaaactatcctttacattttagcacccaagtgcattaaaacataactataattatcttgaaagcacatattgttataggtattgggacatcaggacattctattgttgtgggagtgtaaggatacttgcaggcatcttcaggctgttttcttcatgggaaacattttgtgatcatgggttgtgactgacaaggagtgtttcttgttagtgtcaagatggagctgaacttaaattggtgttactctggctcccctaggcacctgcttccctaacacttgtataggcaaaaggcaaataaatgtaacaggattatgttttccatagaaggctgatgtatgagatacaacaattttttttttttttgagacagtatcttgctctgtgacccagcctagagcagtggtgcgatgatggcttactgcagccttgacctccccagctcaagcacctccgcctctcaagtagctaagactacaattgcccaccagcacacctggctaattttttattttttacagaggttaggtctcgttatgttgcccaggctggtctctggctcctggcctcaaacagtcctgcttccttggcctccaaaagtgctgggattacagatacagatatcagccactgcacctggctaacaacttaattcgtaatggtttacttttttcccccagagcttgttttcttttctttctagctggtttttatttccttttcaatttaagagtgaatttaacattccatctgaagacaatctgatagccatgaaatctttgtgtgagaaagtagtctctgggccgggcgcggtggctcacgcctgtaatcccagcactttgggaggccgaggcgggcggatcacgaggtcaggagatcgagaccatcccggctaaaacggtgaaaccccgtctctactaaaaatacaaaaaattagccgggcgtagtggcgggcgcctgtagtcccagctacttgggaggctgaggcaggagaatggcgtgaacccgggaggcggagcttgcagtgagccgagatcccgccactgcattccagcctgggcgacagagcgagactccgtctcaaaaaaaaaaaaaaaaaaaagaaagtagtctctgtagtcttactacagagatcagtagtgaagaggggcctggtaggatggctcacacctgtaaccccagcactgtgggaagccaaggcaggtggatggcttgatctcaagagttcaagaccagcctgggcaacatattgagaccccatctcatttgtgaaaaatcatattaatataagttaaaaaaaatagtggagagggaaagggtctttcctgtttcccttcagtcatttacaacattttacaaaacgctataggtaggaaagaaggcgaatctgtaatcagggaatggaggattccagctagctatgtgaaagctgtgtgtcaggtcactcaaccccatgatcacattgcttcaagataatttaaagatctaccagcttaaatttttgaattactttgttgtttttgttgtttgttttgagatagggtctcactctgtcacccaggctggagtgcaggcgcgatctcagctcactgcagcctccgcctcctgggttcaagtaattctcctgcctcagcctcccaagtagttgggattacagacatgtgccaccacactcagctgatttttgtatttttagtaaagacagggttttaccacactggccaggctagtctcaactcctgtcctcaagtgatccacccaccttggcctcccagaatggtgggattacgggtgtgaaccactgcgcccggcctgactcatttgttcaaacagcctatgtaggtagaaaatttctaggtatgtaattccaaggtaataggtaaattgtgcctgattaagcatgaattttatttccctatacattagtaatttctgagagttgtatttaaattcgatttcagggtccttaggtaggaccttaggacactacacacagttcagtctcattgcttgttatttaaatttttccacactttccagggcaactggttcccccttatattttccaaatatatgggatgccggatctcaaatcctccaccctcataccacagcctaactcttcaagggcttgcagtgaaatctgtttctgaacatttcacatgagaggaaagcagagaataaccactagacatttgcctgaaaaatcctttctgcctctcctccttttatctttcctagacacagacaccttatcaggatgtctttgggatgaggttcctttatggaaactttgcagggtgatatgtcttcagtacaccctcctatcttttccagattttgagttttagaactgcctgtagctgacccaagacccccacaattgccatgtctcttggagggtctagtgggtatctgtgcctaggggagtggggcctcccaagggagcagctgaatgactagtggtggaggagatgcctggtatacttttcatctagatacccagttcgtgggtgctcaccttctctctcctaacttcagtttccattaattggagacacatggccaatcagctaattggatgttgctattgaggaaaaacagaaatgattcctgtcctttggattgtctcaactgtgaagagagaaatatcccaaaagacaaggaaaggccaccccaacaaggttgtatttagctgtcctacagggaggtggtcaccagaatgcagttgtggaacaaatatatgtgagttgaccacatggaggaactgggaggaggtgtagaactggaaactctgttgagtttgagtaaagtttacttctgttatgagaatgttaaatctataatcaaaatgcatgctaaggtaacatatcaatataagaactcactataaccggcaactctagaattaattaaattattgtatatggagatgacaggtagtggattgattattctcctgtagataaccatttgtccctgctttttctgttaagtgttcaccacttgtatcattggctgacaatacctggtttgtcatagtttcacattaccttaaatagatgcccagactgggtgtggtggctcacgcctgtaataccagcactttgggaggctgagactggcatatcacctgaggtcaggagtttgagaccagcctgaccaatatggtgaaactccatctctattaaaattcaaaattagccaagcatagtggtgcatggctgtaatcccagctactcgggaggctgaggcaggagaatcacttgaacctgggaggtggagattgcagtgagccgagattgcgccattgctctctagccagggcaacaagaacaaaattccgtctcaaaaaaaaaaaaaacaacatagatgccctcgtttcacaatttgctgttttccattggtctatctttccatctgtctgttaataccactttctcttaattagtatagagtacaaagctgcagtgtgtagtagggatagtgcctctctatcttagtcatcttgggctgctatatcaaattaccatagactgggtgacttaaagaataaacatttatttctggcagttcttgaggtcatgaagtccatcttcagagagctggcagatctagtgtccagcaagggcccgcttcctggtttgcaaatgatcgtcttcttgtggtttcttcacatgacagaggagaggaagccggctctcctgtgtcttcttataagagcactaatctcattcagaaaggatttactcctatgctctcatctaatcctaattacttcccagagatgtcaccttctaatactatattgggagtaggttattaatgtatgatttttttggattgatgcaaatattcatgccataacacctcccaacaatattctatagaggatcttgtctatttttagtcattgtcttctatttcagtctttagaagtacctttttcttaattttagtgagggaaacaaactgcactgtaaatttcataaaatataactgtaggcatatttcagagaggttacatcatagtgatacttaatctccttttaaggacacatggcatttttccatttattgcattttatactgatgtttttcagtataaactttttgcataataatcattttttatccttcttgagacttttttggacttcaagaaaattagttttaaaattagtggccaggcacggtggctcgcgcctataatcccaacactttaggaggtcaatgcatgcagatagcctgagttcaggagttcaagatcaccctgacgagcatggagaaaccccatctctactaaaaacacaaaattagccaggcgtggtggcagaggcctgtaatctcagctactcaggaggctgaggcaggagaatcgcttgaacctgggaggtggaggttgcagtgagccaagatcccaagatcgtgccattgcacttcagcccaggcagcaagagtgaaactttgtctcaaaaaaaaaaaaagaaagaaaataaattagtccagcctgggcaacatggcaaaccttgtctatacaaaaacttacctggtcatggtgatgtgcgcctgtagacccagctactcaggagactgaggtggaaggatctgttgagcctaggagttcaaggctgcagtgagctatgattgcaccactacactccagcctgggtaacagaacgagaccctgtttcaagaaaaaagaaaagacacaaaaaaattagtttcaatatgctatgctgttgttgctgataattaaaattcactgagatttatttctgtatagagtgtgcattctagaaactaactaaaagtattacatatgcacaaaatacataaaagagttgcacaatgaatccaaatattgatggagtcagtactgtgaacgataactgccttacttttctttatacttccccaacctgggtacccatccacatcagtatattttatttttgcatgttttttatgcaaaccaatatgtgattttttttttttttttttttgagacagagtcttgccctgtcgcccaggctggagtgcagtggcgtgatctcggctcactgcaagctccgcctcccgggttcacgccattctcctgtctcagcctcccaagtagctgggactacaggcacccgccaccccgtccggctaattttttgtatttttagtagagacggggtttcaccgtgttagccaggatggtctcaatatcctgacctcgtgatccgcctgcctcagcctcccaaagtgctgggattacaggcgtgagccactgcacccggccaatatgtgatattttatattggattttatttaaactcagttatgaaccttacatggaatgatagttaattcactttcttatttagttgattttattatttagaacagtggttgtttacccaaaacattgagcagataatccagagttccctcatttttcttccaagctcatagttccccctattttaaacatcttgactggccaggtgctgtgcctcatacctgtaattctaccacttagagaggctgaaatgggaggatagcttggactcaggagttggaggccagcctaggcaacatagcaaggccctgtttcaaaaaaaaaaaaaatgttttaaaccaaggaaaccatattgactgtgtgtagtgtatcctataattgatgcaagaatatattacatgtgaacacgatgaaaattgaagaagccaatattattattacctaaagtccatcttttacatgaaacttcactctttttgggctgtggtttaagacaactacgtgtgtcatgtatccaccatcacagtcttatacagaagcgtgtcacaggcctcaaaatcccctgtgctcttcctaatcatagctctcccctccctcttctgccacccctatttatccctggcaacaaatgataatgttcctgcctcggttttgcattttccagaatattaaatatttggaatgatgctgtaagtggccatttcagacttgcttcctcgatgtaaaaatatgcattgaaggtctctcgatacctttgttgcttgacaactcatgtattttttatttttatttatttatctaaaaaaaattttgtttttgaatggtgtgaacccaggaggcggagcttgcagtgagctgagatggcgccactgcactctagcctgggtgacggagcaagactccatctcagaaaaaaaaaaaaaaaaaatttgtttttgttttgttagagacagggtctcaaacaccccagctcaggtgatcctcccacctcagcttcccaaagtgctgggattccacttgtgagccatcatgtccggccactcattttctttcatcactgagtaacattacgttggatgggtgttaccatagtttctttattcacctactgaaaggctcatcttgagcctggtgtgatgcctcatccctaaattcccagctacatgggagacagaggtgagacgattgcttgaggccaggagttagagaacagcctggtagatacagtgtgagacctcatctatttttttttaaaaaaagactcaccttgtttgagtctagtttttggcagttatgagtaaggctgctaaaaacgtctgtgggaggacttttgtgtggacatcagttttcagttcatttgggtcaatattgtaggattgagactactgaatcagtaggaccatgcttattttcttcagacctccgcagactgtcttccgaattggctgtagaattttccattcacatcgatagtgaatgagtgttcattgtcattggcattaggaagtgtcagtgttttggattttagctactgcaccaggtatttgctgctgcctcattgttttcttttttttctttttttctttgtttgtttgtttgtttgtttggagatgcagtttcgcttttgtttccctggctggagtgcaatggcgcaatctcagctcactgcagcctctgcctcccaggttcaaacgattctcctgactcagcctccagagtgtctgggattacaggcgtgcgctgcctctcctgaccaatttttgtattattagtagagatgaggttttaccatgttggccaggcaggtctcaaactcctgacctcaggtcatccacctgcctcggcttcccaatgtgctggattacaggcgtgagccactgcgcccggcctgttttcatttcgctctttaatgacacgtgatgtagagcatcctgtcatatgtttgccataattacagtctttggtcgggtgcggtggctcacgcctgtaatcccagcactttgggaggccaaggcgggtggatcaggaggtcagatcaagaccatcctggctaacactgtgaaaccccgtctctactaaaaatagaaaaaattagccaggcatggtggcgggcgcctatagtcccagctactgggaggctgaggcaggagaatggcatgaacccgggaggcggagcttgcagtgggccgagatggcaccactgcactccagcctgggcgacagagcgagactccgtctcaaaaaaaaaaaaaaaaaaattactgtctttgtggggaggtatacttggaaagatcttgtttttttttttttttttttttgagactgtgtctggctctgttgcccagtctggagtgcagtggtgtaatctcggctcactgcaacatctgcctcccaggttcaagtgattcatctgcctcagcctccagagtaggtgggattataggcttacaccaccaggcccaactaatttttgtatttttagttgagactgggtttcaccatgttaggctgatctcgaactcctgacctcgatgatccacccacctcagcctcccaaagtgccgggattataggcatgagccactgtgcctggctttttgcttcttttttgattggttgttttttttcttatagaattttaggacttcttcataccttttggataccagtccatcaccagataggcgttctgcaattattttgtcccagtctgtcacctttttattctgttaacaaagtcatttccaaaacagacagttttactttgtttgttttgtttttaaattatactttaagttctagggtacatgtgcacaacgtgcaggtttgatacataggtataacatgtgccgtgttggtttgttgcacccatcaacttgtcatttacattcggtatttctcctaaggctatcctcctcccagccctccagcccctgacaggccccggtgtgtgatgttccctgccctgtgtccgagtggtctcattgttcagttcccacctatgagtgagaatatgcagtgtttggttttctgttcttgtgatagtctgctgagtatgatgatttccagtttcatccatgtccctgcaaaggacatgaactcatccttttttatggctgcgtagtattccatggtgtatatatgccacattttcttaatccagtctatcattggtggacatttgggttggttccaagtctttgctattgtgaatagtgaatattgctttatagtagcataatttataatccttagggtatatacccagtagtgggattgctgggtcaaatggtatttctagttctagatccttgaggaatcgccacactgtcttccacaatggttgaactagtttacagtcccaccaacagtgtaaaagtgttcctatttctccacatcctctccagcacctgttgtttcctgactttttaatgattgccattctaactggcgtgagatggtatctcattgtggttttgatttgcatttctctgatgaccagtgttgatgagcattttttcatgtgtctgttggctgcataaatgtcttcttttgagaaatgtctgttcatgtcctttgcccactttttgatggggttgtttgtttttttcttgtaagtttgtttgagttccttgtagattctggatattagtcgtttgttggatgggtagattgcaaaaattttctctcattctataggttgcctgttcactttgatggtagtttcttttgctgtgcagaagctctttagtttaattagatcccatttgtcaattttggcttctgttgccattgcttttggtgttttagtcatgaagtccttgcccatgcctatgtcctgaatggtattgcctaggttttcttctagggtttttatggttttaggtctaacgtttaagtcttaatccatcttgaattaatttttgtgtaaggtgtaaggaagggatccagtttcagctttctacatatggctagccagttctcccagcaccatttattaaatagggaatcgtttccccatttgttgtttttgtcaggttcgtcaaagatcagatggttgtatatgtgtggtgttatttctgaggcctctgttatgttccattggtctatatatctgttttggtcccagtactgacagttttactttgaagtccaatttatcgattttctcattcacagatcatgctttttgtgttgtgtgtgaaaccttattgccaaatccaaggttgtcatggttttcacaagtgttacgttctagaagttgtgagttttgcattttccatttaagtaaatgattcattaggaggtagttttgtaaaaggtgaagttctgtatctaattcatttctttgcatttgctaatccaggtgtttcagtaccatttgttgtatgccaccatgtctaattatttatttattttattacagagacggggtctccctatgttgcccaggctggtctcgaactgctgggctcaaatgacctgtctgccttggcctctggttttgaatttttaatacatgtctttatagtagatttttctttttttctttccttttttttttttttttgagacagagtctcgctctgtcacccaggctggagtgcagtggcgccatctcggctcactgcaacctccacctcccaggttcaagccattctcctgcctcagcctcccgagtaactgagactacaggtgcctaccaccacgcttggctaattttttgtatttttagtagagacggggtttcaccatgttagccaggatggtctcgatctcctgacctcatgatctgcctgcctcagcctcccaaggtgctgggattacaagtgtgagccaccgcacctggcctatagatttttctacgttccttgtgcctctctgtcatcttatggaatcttctcttgtatagttcattgagtgtttttaatcatgaggagatattaacccatttatgctggagattgcaattttttgaattgcagatgtgtgagaaatcagactttggcaataaccttgaacagtaggatataaataactcccacatgcttagcgttccaaaaatggaacactactcataaatgggctaaggcttgtcagataccttttctgcctctatttattcattcttgtcgttttttgttcgtttggagacggagtctcactctgtcatccaggctggagtgcagtggcatgatcttggctcactgcaacctccatctcccaggttcaaatgattctcctgcctcagcctcccaagtaacagggactacaggtacacaccaccacacctggctgatttttttttaatattatattttaagttctagggtacatgtgcacaatgtgcaggtttgttacacatgtatacatgtgacatgttggtgtgctgcacccattaactcgttatttacattaggtatatctccttatgctatccctctcccttccccctaccccatgacaggccccggtgtgtgatgttcccctccctgggtccaagtgttctcattgttcagttcccacctatgagtgagaatatgcggtgtttggttttctgtccttgagatagtttgctcagaataatggtttccagcttcatccatgtccctacaaaggacatgaactcatccttttttgtggctgcatagtattccatgtgtatatgtgccacattttcttaatctagcctatgacatctgggttggttccaagtctttgctattgtgaatggtgccgcaataaacatacatgtgcatgtgtctttatagcagcatgatttataatcctttgggtatatacccagtagtgggatggctggatcaaatggtatttctagttctagatccttgaggaatcaccacactgtcttccacaatggttgaactagtttacagtcccaccaacagtgtaaaagtgttcctatttctccacatcctctccagcacctgttgtttcctgactttttaatgattgccattctaactggtgtgagatggtatctcattgtggttttgatttgcatttctctgatggccagtgatgatgagcatttttccatgtgtctgttggctgcataaatgtcttcttttgagaagtgtctgttcatgtcctttgcccactttttgatggggttgtttgattttttcttgtaaatttgtttaagttctttgtagattctggatattagccctttgtcagatgggtagattgtaaaaattttctcccattctataggttgcctgttcattctgatggtagtttcttttgctgtgcagaagctctttagtttaattagatcccatttgtcaattttggcttttgttgccattgcttttggtgttttagtgatgaagtccttgcccatgcctatgtctgaatggtattgcctaggttttcttctagggtttttatggttttaggtctaacatttaagtctttaatccatcttgaattaatttttgtataaggcgtaaggaagggatccagtttcagctttctacatatggctagccagttctcccagcaccatttattaaatagggaatcgtttccccatttgttgtttttgtcaggttcgtcaaagatcagatggttgtatatgtgtggtattatttctgagggctctgttctgttccattggtctatatctctgttttggtaccagtaccatgctgttgcgcctggctaatttttgtatttttagtagagatggagttccaccacgttggccaggcaggtctcaaactgctgacctccataattgcacctgccttggcctcctaaagtactggaattataggcatgagtcaccacacctggctgctaccatgatttattatcattacttattggaaaacaaaacttaaaacttaccagcttaaggaattttacacgtacacttgagatagtttgacaaatctacataagttctgtaagatgaattctattgtattttgcttattgcaattatcctgaggtttcacgcatgttgtagtatgtaacaagacgttttcttttttttttttttgagacagcaggctggagttcagtggcacaacctcggctcaccgcagcctctgcctttcaggttcaagcaattctcctgtctcagcctcctgagtagctgggattacaggcatgtgccaccacacctggctaattttgtatttttagtagagacaaggtttctccatgttggtcagactggtctccaactccaacctcaggtgatcgacctgcctcggcctccaaaagtgctgggcttataggcatgagccacagtgcccggccaagatgttattttctaagtataaataatatttcaatgtattgtgtccggaattggtgggttcttggtgtcactgacttcaaaaatgaagccgtggacccttgcggtgagtgttacagctcttaaggtggcgtgtctggagtttgttccttctgatgtttggatgtgttcagagtttcttccttctggtgggtttgtggtctcgctggctcaggagtgaagctgcagaccttcgtggtgagtgttaacagctcttaaggcagcgcgtctggagttcttcgttcctcctggtgggctcgtgatctcgctggcttcaggagtgaagctgcagacctttgtggtgagtgttacagctcataaaagcagcgtggacccaaagagtgagcactagcaagatttattgcaaagagcaaaagaacaaagcttccacagtgtggaaggggacccgagtgggttgccactgctggctcaggcagcctgcttttattctcttatctggccccacccacatcctgctgattggtatagccgagtggtctgttttgacagggcgctgattggtgcgtttacaatccctgagctagacacaaaggttctccacgtcccccccagattagctagatacagagtgttgacataaaggttctccaaggccccaccagaatagctaggtacagagtgtcgattggtgcattcacaaaccctgagctagacacagggtgctgattggtgtatttacaaaccttgagctagatacagagtgccgattggtgtatttacaatccctgagctagacataaaggttctccaaggcctcaccagagtagctagatacagagtgtcgattggtgcattcacaaaccctgagctagacacagggtgctgattggtgtgtttacaaaccttaagctagatacagagtgccgattggtgcatttacaatccctgggctagacataaagtttctccacgtccccaccagactcaggagcccagatggcttcacccagtggatcctgcaccagggctgcaggtggagctgcctgccagtcccgcgccatgcgcccgcactcctcagcccttgggtggttgatgggactgggtgctgtggagcagggggcggcgctcatcggggaggctcgggccgcacaggagcccatggaggaggtgggagactcaggcatgatgggctgcaggtcccgagccctgccccgtgggaaggcagctaaggccgggtgagaaatcgagcgcagcaccggtgggctggcactactgggggacccagtacaccctctgcagccgctggcccaggtgctaagcccctcattgcccagggccagcagggtcggccggctgctccgagtgcggggccgccaagcccacgcccacccagaactccagctggcccgcaagcgccgcgcgcagccccagttcccgctcgcgcctctccctccacccctccctgcaagctgagggagccggctcccgccttggtcagcccagaaaggggctcccacagtgcagcagtgggctgaagggctcctcaagtgccgccaaagtgggagcccaggcaggggaggcgccaagagcgagcgagggctgtgaggactgccagcatgctgtcacctctcagtatgtatatacttaccacattttgtttatccattcagccgtcagtggatatgtgggtggctgcattgctcattactgccaccccaggaaggttgtatagtggttgaatctgtgcttattacacctggtatctcttaggagtttctcgtttggcctcttgtgcacttagggtgccaggttttgcttaggaatgtcccctttcctttgcccttcttaccagcatctatctagctgcattctgacaggataactgcaaagtgaatgattcctgggcatcataatggatgtttctttctacttaggtgtttcccctcctctctgcttatatctagcatgcctgttttgggtggtccctgggggtgtgggctttcccctggacttcccctcctgctcttggctagctatctgccttctctaacaatgtcatcaaagattacactttgggaacaggcattttcaaggaaacacagcctcaggactgctaatgttaacttttttctgcctattaattcataggactccgttatgacaggtgctacagacccacagtccaaagagacattagggacagcccaggcagctcgtttttctccctggatttgtagcaggacaagccgcagacaaaacctctcagacactgggttagagaaggaagtggctttattcggccaggagcgtcagcagacttgcgtcttaaaaaccgagctcccagagagagagaaattcctgccccttttgaaggcttacacagggatccacatgaaaggatcgtgatcaattaaacaaggatggagtgtgtaattggggctgcatgcatcggtaacaggacagagcagaacagaaagactttcacagtgctttctcatacaatgtctggaatctatagataatacaagtggttaggtcaggagttgatttttaactaccaggcctggggtgtggcaccgggctgtctgactattgatctcatttctgccttcctttaacttttgcttcctctttcttgttctgaggtatgagacaataagagaggtggtctccttccttattcccccctttgagaatctcacttattaatgggagttctcactttcatccttactacctaggtcttcctgcaagacagatcaatagtggttaatgtaatacacttgtgctgaaacattttggtggaccaaggtagtgacaaagcttctcattatttgaaggagcacaggtagcaagcaggggagtaacaagcaggtttctattattattattatttctattataagtgttttaaatcctcctagtgctggaaaccattttccaaatacagatttaggattaaacccatgccaaagctgtacaggcacatgtgccaactttgttatgtccttaactatgtttttgactacttgcccttgattatttatatgcagacagcaattggttaggttaaattttccatagacccctcctttagctgctagcaagtagtctagggccagtctattttgatagatagcatttttcatctgggtttcttaccgggctaaaacagttaaagctctgccagttttagtagtgattatttctaagatagcttgtaaccatatgatccggttgagcatgtaaatgggggtctcttttttttctgttttagctattttttttacttctattacctagaaaagaactagtttttaaatcttatttcaaagactgtgatcatgggaggctcagatgggttatggtacacatcaggtcgggcatttcctgggttacacactttgtactgagtggtgttatacaggcaagttccttttaaagttcctaggcattcataataactagaaaaccgaaagattgttttaacttgttgccctacctcagtaacctgatgaatacactgggaacaatcttccatgtggggaaaatcagttgaagtccttattctacaagtccaaattttaaggagaataagtcccatgatgagtttcctcatgctttggccgcacatagaccagtcagcttccaggtgtgacaggagcagggcttgtcgtctttttcagagtcactttgcaggggttttccaggtttggtcctgcctcccaggagctgcaggttttacatgactgtggtggatccaggccgggattccctctaccttcacggtggtgtgagtggtctgtggtcccttccaccatgggcacaagggggctacattccagtccttgatccacactctattacctggggagaaagggtgaactggggagaataagctaatggggcgtttctcgtttacctaggctgagattgttcgtgtaatttttcgtaaggcctgtagctgtcgctgtaacttaatttcacctaattctcagggagtgcctggaagtccccatactatgggaggagggctatgatataatatttcataaggggaatatcctgtttttctagaaggggtaaatttaatcttaataccacagggagagcttgtacacactttaatcctgtttcttgacacactttccctaaactatttttgatagtccaattcatccactccacctttccggaactctgaggttggtaggcagcatgcagtatccatgtgatccccaatacctttgctgtcttctgtaccaagtcagccacaaacgctggcctgttatctgagccaattcgtaagggcagttcaaacctaggaataagatcttgaagaagcacacgggttacttcaccagctttctcagttcgcgttggataagcttccacccacccagagtatgtacacacaagaactagtaaatacttgttatcttcacattttggcatttctgtgaagtctacctgcagatcttcaaagggggctgctccataagcttgtatgccagccgggacggttggaccctgccttgcattgtgttgttggcaggtaatacatcgctgtgccactgtttcagcaagggctgataaatgtgagatgtagaagtaccggcttaacaacttttgaagtgactcctggcctagatgggtggttttatgcacagccagtatgactgtggctcccagcagctgtggcacagctactctcccatccagtaaccacatccatccttcttccatcacctgtcctccctctgcctggagaaagtccttttcttctttagaataagtgggtacaaggtaggccactggccttggccagggccccacagtctgggttagaactccaactgcctttttttctttttctgacacagtgtaaaaggctttgttagattaggtagccccagggctgggactgacataagtttttcctttaactcatgaaaggctcactgttgttgggattcccattcaaaaggttcccagcacccctctttgtgaccccatatagaggtttggccagtactgcaaagtttgggatccacagtctgcagaaccctactgctcctaagaattctctcacctgccttctggttttaggttgcaataggctgcagatgacctgctttctttctgagcttgattgaccaagcacaagtcctgtactggcctgtagttcttggtccctggcttgggaacaggcaggagggtagtgttccatggagactggcaaaggactataattccaaaggctctcaagtgcttgaggtggacctggattccttcaagagcttctctagggaaccgggtactgtttttgcctgaccggctgggccccaggcttaacttctgtaggtacgggggtttggttgactgccagccctggagggttgtcttctgcccacacctttgaccatcacttagccagagctggtcttatctcttgacctggctcggttaagaaaagtcttcattcctcctcctgggggacagtaagggccatgatgactccctttccgggtaactttagctgtaaaagagctgtgctctgtaagagagatggtggctctcagcttgctaagcaagtcccttcccagcaagggcaaggagaagtcgggcatgtacaagaactggtggattacttcatgtacccctatagtacaagtgcagggcaagcagaaagcttgttttgccgagactcgtgtggcttcgattatatcaatagtctttttggataagggggtgaccggggtggttactactgaatattcagcaccagtatcgacaagaaactctatgtccttgtccctgactgtcatcctgaccatgggctcgttaggggcacctgagcctggtcccccttagtccagtagcccttctgccagattaaacaaggccctttcatccttgcctgagacctctggcttggagccattttgtttcttctttaactgggggcacttgtctttccagtcttagatcgtaaatgagctgccaagggaggggtttctcccgcagcttcacattctctcttgtctgttctgggtggtctaggggtgtatctgtccagaggaggcacaggtgctgtgggctcaggagtggggagtctctcttctaggtaaggacggggggcattgctgtgccatttcctgccatgggtcctctgacattgggtcagatagaactttaggagctgacttcccttggcgggtggggagagatccctcattggctatctgtccctttgccactaacactgctgctgcctgtcctctcaaccactgtggggggtctaaaaccagctgtaactaagtgtctgtgtacaggaacttgtctggataccctggcttacaggtaatcttgtgccatacctttgaaataagggacctatccaggcttccttctgatggccaacccacctctaatgctggccagtctgtctcacacaaagttctaagttttcctggtgttatagtaactccatagtctcccttaaatccctttttgaaattttttataacatagttcctagtggggtgggcttactttgtgtctgacccatttttctttcgagacaagacaacactcacactacaagagggaaagggtaaaggtcactcacgcgtggtggtacatgcctataatcccagctactcgggaggctgaggcaggagaatcgcttgaaccccggtggtgagccaatatcacgccattgtactccagcctgggcaacaagagtgaaactctgtctcaaaaaataaataaataaataaattgctttatggaagaaagtaagtatagatggagagaaagggatctgataaccgaagcagggaataaatgtttggagtccacagcatcctgagaacttcttgggaatagagtctaggcctccagtgctgtcactctcacccatcttcctctacacatgtgagatgtttcaggacccagtggcctttgaggatgtggctgtgaacttcacccaggaagagtggacattgctggatatttcccagaagaatctcttcagggaagtgatgctggaaactttcaggaacctgacctctataggtaaggatgacaatattccttccgtcagtgcattagcaaaccagtgtttctagctcatgaatgctgttgagtgattttgaacatagacaggaaataccttgatgaataaatgaggcatggctgcagtaaatcatgggcacagaatctaataattttttcacaattttatactgcttcaggactatttttctgtgtctgtattttaggaaaaaaatggagtgaccagaacattgaatatgagtaccaaaaccccagaagaagcttcaggtaatttgcatttccaagagaaagcagtgtctctctgcacaatcttagaatatgagaatatgttgaagagaagtaaaacaaagaactaaatccagcatcaaattcatttcttcttagaatattttctcaaaaaacatatatttaaacgtgactgaggctgagggctcactcctgtaatcccagtcctttgagaagtggagataggaggatagcttgaggccatcagttccagaacagcctgtgcaacataacgagaccacatatcaacaacagcaaaaaattagctgggcattgtggtgtgtatgcatcggtagtcccagctactcaggaggcgaaggcaggaggatcactcgagacttcaggagttaaaggctgcagtaagctatgatgatatcactgtactccagcatgggcaacaggacaagaactggactcaaaagaaaaatgacatacagtatttagtaattgtaaaatagtttacatgggaatactattaagaagccccttatgaatatttttttaaacaataggtatggctgggtcatcttgtagaacatgtccagtcaccttcaaacgattcagacagggcagaaagcctacactttgatggacagtgttaaaaatgcaagtgcaatacttgttgattaatatagaagtacttgtaaacaaacccttcatgatgtgtttctcatgttttacaggagtctcatagaagagaaagtcaatgaaattaaagaagacagtcattgtggagaaacttttacccaggttccagatgacagactgaacttccaggagaagaaagcttctcctgaagtaaaatcatgtgacagctttgtgtgtgcagaagttggcataggtaactcatcttttaatatgagcatcagaggtgacactggacacaaggcatatgagtatcaggaatatggaccaaagccatataagtgtcaacaacctaaaaataagaaagccttcaggtatcgcccatccattagaacacaagaaagggatcacactggagagaaaccctatgcttgtaaagtctgtggaaaaacctttattttccattcaagcattcgaagacacatggtaatgcacagtggggatggaacttataaatgtaaattttgtgggaaagccttccattctttcagtttatatcttatccatgaaagaactcacactggagagaaaccatatgaatgtaaacaatgtggtaaatcctttacttattctgctacccttcaaatacatgaaagaactcacactggggagaagccctatgaatgtagcaaatgtgataaagcatttcatagttctagttcctatcatagacatgaaagaagtcacatgggagagaagccttatcaatgcaaagaatgtggaaaagcatttgcatataccagttctcttcgtagacatgaaaggacccactctgggaaaaaaccgtatgaatgtaagcaatatggggaaggcttatcctatcttataagttttcaaacacacataagaatgaactctggagaaagaccttataaatgtaagatatgtgggaaaggcttttattctgccaagtcatttcaaacacatgaaaaaactcacactggagagaaacgctataaatgcaagcaatgtggtaaagccttcaatctttccagttcctttcgatatcatgaaaggattcacactggagagaaaccctatgagtgtaagcagtgtgggaaagccttcagatctgcctcacagcttcgagtgcacggtgggactcacactggagagaaaccctatgaatgtaaggaatgtgggaaagccttcagatctacctcacaccttcgagtgcatggtaggactcatactggagagaaaccctatgaatgtaaggaatgtgggaaagccttcagatatgtgaagcaccttcaaattcatgaaaggacagaaaaacacataagaatgccctctggagaaagaccttataaatgtagtatatgtgagaaaggcttttattctgccaagtcatttcaaacacatgaaaaaactcacactggagagaaaccctatgaatgcaaccaatgtggtaaagccttcagatgttgcaattcccttcgatatcatgaaaggactcacactggagagaaaccctatgagtgtaagcaatgtgggaaagccttcagatctgcctcacaccttcgaatgcatgaaaggactcacactggagagaaaccctatgagtgtaagcaatgtgggaaagccttcagttgtgcctcaaaccttcgaaagcatggtaggactcacactggagagaaaccctatgagtgtaagcaatgtgggaaagccttcagatctgcctcaaaccttcagatgcatgaaaggactcacactggagagaaaccctatgaatgtaaggaatgcgaaaaagcattctgtaaattctcttcttttcaaatacatgaaaggaagcacagaggagagaagccctatgaatgtaagcattgtgggaatggattcacatctgccaagattcttcaaatacatgcaagaacacacattggagagaaacactatgaatgtaaggaatgcggaaaagcattcaattatttttcttccttgcatatacacgcaaggactcatatgggagagaagccatatgaatgtaaggattgtgggaaagcattcagctagcctggttccttttatggacatgaatagactcacactggaaggaagcactatgaatgcaagcaatgtggcaaaactttcacattttccagttcttttcgatatcatgaaaggactcacactggggagaaaccctatcaatgtaagcagtgtgggaaagccttcattccttttacttcttttcaatgtcatgaaaggactcacacgggagagaaaccctatgagtgtattctagttccgtttgatatcatgaaaggacttacactggagtgaaaccctatgaatgtaagcaatgtgggaaagccttcagatgtgcctcgcaccttcaacggcatggaagggttcacacttgggagaaactctatgaatgtaagcagtatgggaaagccttcagatctgccaagattctttgaatacagataattaatgtaaacaattatcataagtatactaacatgttattctttttaaataagaaggtataataaaatatcccattggttttatgtattagatcaagcttataatgttacattgttattatttggacattgtgagtcagtattaccatgtggataaaatgccaggcatctttttcctcatggaaagtttactttttgcaccgggcacagtggctcacgcctgtaatcccagcactttgggaggccaaggcaggcggatcacgaggtgaagagatcaagaccattctgaccaacgtggtgaaaccctgtctctactaaaaatacaaaaattagctgggcatggtggcgcgcaccggtagtcccagcttctcgggaggctgaggcaggagaatcgcttgaacctgggaggcggaggttgcagtgagcagagatcacaccactgcactccagcctggcaacagagcaagactccatctccaaaaaaaaaaaaaaaaaagaaagaaattttacttttcatgcttatgtacttattttttatctcaaccctaattttgctggtttttgttttttttttttctgatagtctcattctgtcgcccaggatagagtgcagtggcgcagtctcagctcactgccacctccgcctcctaggttcaagtgattctcctgcttcagcctcctgagtagctgggactacaggcgtgccccacctcacccagctagtattcgtatttttttagtagagatgggatttcaccatattagccagactggtctcaaactccggacctcgtgatctgcccacctcggcttcctaaagtactgggattacagacatgagccactgggcccggcctcaaccctaatttttcattcactcattatgccaaaagttatctcatatacctctgagtgccttcttccccaaaaccaccagtgccatacctgctgtcagcaagggtgtaatatactgtagtggtaaatatgaccacaagtcataaatgactgtgggatgtatgagaattacaagtcacattagtaagaagagaaaaattttggtcatgtttatgatttgaaatatgttttcttttatcacatttagaaatatagttataaaatattctctttttttgtcctgatccatcatggtcactgaggagcatcgtctcatatgcccggtatgtgacttgtgtctctccaatggtaaaagccttggccttggccagacactgtggctcacgcctgtaatcacagcacattgggaggctgaggcaggcggatcacctgaggtcaatactttgagaccagcctgaccaatatgatgaaaccccatctctactaaaattacaaaaattagccaggtgtggttgcatgctcctgtaatcctagctagtcaggaggctgagacaggagaatcgcttgaatctcgggggagggcagaggttgcagtgagccaagatggcgccattgcactcctgcatgggcaacaagagtgaaactccatctcaaaaaaaaagacttggccttgtgatgaggggaggtcagctctagactcttggaccgggttttgccttacttattctctaaagactaaaatatttcctaaaatgtatgggcactgtttactagaaagtaccttagttaaaacatacaaattcatttatgccttataaagctatattttttcaaattgttttactaagtcataggaagctaatacagttgtgtaaattgtctgaatacaagcctttctttctctgataatgtgctgttgatgctaacttgtcaacagcctgcttatctcagcagtgtaaagttaacagcaacgtggaaaagtaacttttatatattatgcaatggcatagaacaattcagtcacttcccttaaggtaccaatgaagctgctcttcagaaacccttatttaaaaaacactgtcaaaatccaggcaccaaaggatgcagcatcaatcattgaccaaaccctatctgtgtgtggagatgacatacccagtctcagataatgcatcctcatcagtgaagggtggagtcattgattgtcagatcacacaaagtgactcacagcagggaagacagggcagtggcagagatgggggcacctgaccaggtgcagtggctcacacctgtaatcccagcactttgggaggctgaggcaggtggatcacttgaggtcaggagttgaagaccagcctggccaacatggtgaaaccccatctctactaaaaatacaaaaattagctgggcatcgtggtgtgtgcctgtaatcgcagctactcaggaggctgagacaggagaatcacttgagcctgggaggcagatgttacactgaactgagatcacgccactgcactctctagcctgatcaacagagcgagactccatcacacacacacaaaaaaaattaaaaaagagttgggtgcacctggatctaacccctgtctcatccttctgccttgaaggccaaatgcaccctgatacttttcaccaaagagtagaaacaccaccatccacttgaccccaaatgtgactttccacaggatgcaagcacagtgttggaatagccaaagacagtaacaatagaagtgcagggtgagggtgatgaacaggacacactggagagcctgacattggcctagactacgggggtgtcttgatccttcacaaagagcccaaggagcaacccaaagagacactggagcacaggcccaaagggtgttcatatgccaggaaggccactaattttagaaggcagtgatgttggttcctgttggagtcctgatcctttataacatatgcttttctgcatctggttagacaaggaaatctgcaatttttgacttgcagcatttagaaataagttattttagcaatccacacactcgtggtttattctgaactaacttgagacaaacagctacagatagggaatatcatgagtatttccaagactaaaactcttcacaaagtcagtgggaccctctcatgggagggttttaagacccacaataaaaaaggtggggaaacattgagtggaaagagggcagcaggtcaggggccttccccagaggcctaacacacccaacattaccctggatgaaaacaaatacataccataacatcacactttcttcaatgtgtaacagagaaaatgaaatgtattcaaaggtaagctttcagaattccactttacacaattaataaggttttaatattactctgtgttgatgttaaggaattattaaatatgaacagcattttctggttatatatggaaaataccttgatttatgaggtatgaaaatgctcatttttacgtatgcatgttttacttttgtgctttttttataaaacaaggtgaaaaaacaggaaaaaaatttcagatcaaggaagttaagcagattaataggagaaaagttatacaaatttatttaacatgtatatatgggagccttcagaatgaagacccacccaacaataagacaaaaacttatataccattccagggtaggaaagaatgcagatgtggcatggccaaaaaatcccaggtttgatgggtaagtcaagtttaatagcaagacagattctgcaagaggaaaggaagaagcttggctagcaaagcagacctttttatgcagatgaaggctccctcagagagaataggtgggaaattctgcttttcattcagactttcatttagaattttaagtaatagagtcaggattatgctatgttgcttgggttgctctctaattgtttgtctcaagcagtcctcccagctcagcctcccaaagtgctgggattcgaggcatgagccaccatgcccagacaaggtttgtctccttataaagaattattcattgctgggcacagtggctcacatctgtaatcccaacaatttgggaggccaaggcaggaggatcacttgagcccaggagctcaagaccagccacagcaacatgacgattccctctctctacaaaaaatacaaaaaattagctggatgtggtggcacataccatatccaggaggctgaggcagaaggagaaccaaagcctgggaggttgatgctgcagtgagctgtgattgtgcccctgcactccagcctgggtaattgagtgagggcctttgttaaaaaacaaaaaacaaaaaaaattgttcacttattgcagcttcagattttttttaatgaattgtaaattgcattttcattacaattggaaagataagaaaattttgcacagagcccagataaagacagatttcagaaaaatatcatttgtcttatatagagtttgtttcaaaaaaatttttttttttttttttttttttttgagacaaagctttactcttgttgcccaggctggaatgcaatggctcaatcttggctcactgcaacttctgcctcccaggttcaagtgattctcctgcctcagcctcctgagtagctgggactacaggcgcataccaccatgcctggctaatttttgtatttttagtagagactggatttcaccatattgggtaagctggtctcaaattcctgaccttgtgatccgcccacctcggcatccgaaaatgctgggatacaggcgtgagataccgtgcccagcctgaaaattcttgtttaatttttttcttccttagaggccgtgtagtacatttcttggtctatcctttttcgtggatgatttctttttctttctttctttttttttttttttgagacaaggtctggctctggtgcccaggctggaatgcagtggcacaatctcagctcactgcagccttcatcttccaggcttaagctatccttccacctcagcctccctaatagctgagaccacaggtgcacgccaccatgcccaaagtgctgggattacaggtgtgagccaccgtgcctggccatttatgcatcatttctaacagtttcagggcttagctttgggaatgctgcttgggaaaagaaatagggaaaatcttttattacagctggagaaaaggaataaacttctacaacaaagtatagtagataatcagtgaattacaaagattcggaaaaatatcagtcctcctttgcaggttggagaacttgtaacggtggataactcttctcttcctgttatctgtggggtaagacctggctggcaactgttgtgatatgtttatattcacatatggttaatgtgtagtatgtgctttgttatggaaatcataatgaagtaataatgtccaccttaataagataataaaattcagataatatgattaaatattgagtttatgtgaacacaaagtttgagggtagccactggggaaacacatcctgaagagtggggtcactgctcccactcttaactggagaagttaagtcttcacttctgtagggcaaaatgaagatgcttaatagggttacattttccatacaaagccaatgcatatatttcaatgatttcattggttgccgcttgccaaattgcagcttaccaaatttcaaggatgattgctttaactttttgtaaggaggggtagtggtatcaaaaggatcctacctctggcacttctcagtgttttctaatgacttatagcccaagaacaaggaagagagttaatctttttgacatgcacacggaaggagcaattacatggtagcgtaaacacatttctcaatatgtttattgagtgaaagggttagatactttccctgatgaggggtgataggtaagtgccttataatttccttccagcctataataaaccgagtttgagagattttgccggattcttcaaacactgggtattttctcattgaaacagaggcctgagtccagtgactgcaaactaaagccagtgagaaacctacaaagagaggtcattgaaagctcacaccaggcgcagtggctcacacctgtaatcccagcactttgggaggccaaggcagatggagcatctcaggtaaggagtttgataccaacctggccaaaatggcgaaaccccatctctactaaaaatacaaaaattagccaggtgtaggggctcaagcctgtaatctcagccattcgggaggctgaggcatgagaactgcttgaactcggggcggaggctgcagtgagccaagatcacaccattgcacttcagattggatgactgagcaagactctccaaaaaaataaataaagctcacctggttcttcccatggtgctcccactgcaggtgttttcagctgctcaaattgaccatgggaggagcgctttatactgacagaacctcagatccctggaaagctagggatccacaggcagatacagtactcagtgatgccctccgcaagtgacagtttttgtcatggagcttttcctagacgtttctagtgaaacaaatgtaggtttcagtaagaaataagttttttttttttttttttgagatggggtctcgctctgtcgcccaggctggagtgcagtggcacgatctcagctcactgcaacctccacctcccggtttcatgccattctcctacctcagcctcccgagtagctgggactacaggcgcccgccaccatgcccagttaattttttctattttttttagtagagatggggtttcaccatgttagccaggatgatctcaatctcctgacctcgtgatctgcctgcttcggcctcccaaagtgctgggattacaggcgtgagccaccgtgctcagccaagaagtaacttttaattaccttaatgaccctgaaatcagcttgtcattaggagaggtcataaaaagagtctaggtactgaacttgcaagtaaaaataaaaatattaaataaatacataaagtggggttgcatataagcctagaagggatcagtcaaaaattcaggggtggctgggtgtggtggctcatgcctgtaatcccagcactttgggaggctgagatgggcagatcacttgagatcaggagttcaagaccaccctggccagcatggtgaaacaccatctctatgaaaaatataaaaattagctgggtgtggtggcacacacctgtaacaccagctagtctggtgactgaggcatgagaatcacttgaaccagggaggcggaggttgcagtgagccaagatcatgctactgcactccagcctgggctacagaacaagactgtctcaaaaaaagaaaaaagttcagggacctggaggaaggagagaaactgaagcatgctttggtagatagatatttcattttgactaaagatcactaaagagaaaactgttcacctaatggtttgtgaggtaaatactggaatatctagtgggtgtctggtttgtcataggtaacaaacgtggcaccatctaattcaccatgggaagcttgtttcattgtagtaaggtgctcttgcacaacacaaaggatgggggatttcatgaatcacagccattttcaggattgcccacccacccccatctcctttccacaccccttactctttttctatccatgtctctgatttgactcgtcctgagttgtatccttcatagtaagtgggtaaatataagtgaactgtgggtagttctatcaaattatggaacttgagtaaggtgttgtacaggacccaggtctagatgcagttgctgagaagtacaggtggcccctagggctttgagtggcatctgctgagtggggctgtgttgggtgagccaggaactcatggagtctctgctaactctgggtggcttctgaattgagtggttgcatgactgcttagtgctggagaattcgctggtgttcagcaagcaccacacatctggtgtcagaaacaaaagacaccataggtcagaaccttccactgactcacagtgagcgagtggtctttggtgggcattgagaccccggtggaaggactgtgtccacactgtggggaggggctacaagggtgttagtagaagtcccagaattaattttctggctgctcacatttccctcacacactgcctaggagtgggccagcctggcctgtgtctccacagtccaagtggttcctaagcttgggaatgtgtaactattggagtgtgggtttccttgtgagctgtgggtgaggcaggctgcctacctgagctgcctccgttttgtttcttttatagaatcttgctaccatggaattgctctttctgcatgcatcagatcattcattcgtttgtttgctcatttatttatttatttatttttcaaacagaatctcactctgtcgcccaggctagagtgcagtggcgtgatctcggctcactgcaacctctgcctcccaggttcaagcgattctctttgctcagcctcccaagttgctgggactacaggcacatgacaccacaccttgctcatttttgtgtgtgtttttagtagtgacagggtttcaccatgttgaccaggctggtctcaaagtcctgacctcaagtgatccacctgcctcagcctcccaaagttctgggatttcaggcatgagccattgcacctggccacatctgagaattttgttttatgatttgggtgttaggattttaattagctggttggaaccttaatgagtagtttggtaacctttgcagaaggaaatagttttttaataagctgttttatgccaagtcaaaataataacaatatgaatactcagacacataccaccccaaaaaataaataggccttgggcagttctggtgtgtctccttggtctcacttatttttgatatgcaaaggtgatcaaagttttgattctttttgttattctttgtatctttgtcatctctttgtcacaaagcagaattttcccacttttgaattctcagtaacataatgttaccattaatacaccattagtattatgctgagagggtgtgtttctgggttttttgcctgagcctgttgtagacatgctgctctgtgaagttgtgggtcatgtaattgattctcttatttcgctgcttaatgggacttgagttggttcaagtctatcttttgatcttattgatagtactcttcttgtttttgtccctaattggaaataattgctggcttgtagattatggataaattcaaatttactatgaaatgtcgatagagtatgaatgtaacttctgaattaaccatctcacctttcatgcacgtgtctttattcttgtgatttgtcaacactttgaattatctaactcactttttgttgcccatctactcttaagtagaatctctgtaagattatgtattttttcactggttgccattggttgagcatttttcctatatgatctttcatcttctgtgttgcagttcccagtcatcctcttacatttgactaatttgtagtgttttttttttcttttttttttttttagacaagagtttggctctgttgtccaggctggagttcagtggcgtgatctcacctcactgcaacctctgcctcctaggttcaaataattctcgtgccttagcgtcccggggcgcataccaccacccccagctaatttttgtatttttagtagagatggggtttcaccatgttggccaggatggtctcaatctcttgaactcgtgatctgcccgccttggcctcccaaagtgctgggattacaggcgtgcgccactgcgcccgtctcttgttttcttgtttttaatttgagacaaccttgctctgtagcccagctggagtgcagtggtgtggccactcactgcccactgcagcattaagctcctaggcttgagcaatcctctcacctcagctttctgcccagataatttttaaaagttttttgtagagacaggggtctcagtgttttgcccaggctggtctcaaactcctgggctcaatgaatcctcctgccttcgcctcccaaggtgctaggattgcagacatgatccaccacgctcagcaatgagcggtttttttttttttttaaaccaagatatctgtacatgtttctgacaaatattttatttaaaatctttaacaactgcatactaaccaaggttattctgtttttcattttcattatgactacttgtttttctttcttattctcattttttacctaattaaaataatttaccatgtagtggccctggcatgcattttgctccttcatacagtcatacagctacctcgatgtcccttctttctgccattctgaaattggacctcattccttgactcttgctccccatctgctatgtgataaagtcctgtctgattacattgtctccaaagcctcttttatagacttccatttgccccttggcatgtcttgcatttactctcctcgaaatatatacttagaggccaggtgtggtgactcacacctgtaatcccagcactttgggaggccgaggcaggaggatcccttgagcccaggaatttaaaaccagccagcgccacagagggagaccctgtcttaaaaacaaaatttatatgtacaagccctaaaccccaacacggtcatatttggacacgacgaaccttttaggatatcacataacatttataaaagagggccctcataatgggattagtgagagagagagagaactctgtctctccaacatgtgaggacaaagcaagaaggcatctagctgcaagccaggaagatagccttcactaggaacaaaattgctggcagcaagattttggattccccaagctccagaactgtgagaaacaaatttctgctgtttaagaaactgagtccatggtgttttgttatactagcctgagctaagtcaccccaagagtcctcacattaaccatatactgtcatacaagtgctgcatttggatctacctggaatgtctccaaattttctgcttttcctcttggacccattgtgagaataggtttgcttcacaggaaactgctggtaatagtagtgatagcctaacagctagggacaaaaaggaaactttctttttctttttctgagatggagtttgtgctctgttgcctaggctggagtacaatggcgcgatctcaactctctgcaacttctgcctcctgagttcaagggattctcctgcctcagcctccagagtagctgggattacaggtgcgtgccaccacatctggataatttttgtattgttagttagagatggggtttcaccatgttggccaggctggtctcgaactcttgacctcaggtgatccacctgcctcggctttccaaagtgctaggattataggcgtgaaccaccacgcttggcctcttttacacacacacacacacacacacacacacacacacacatatatattgttttcttttttaaataaaaataaatagaaactaggtctcactatgttgcccagggtggtcatagcccaagattttggtctccagcgatctatctgccttggccaccccagtgctgggattaaggcgtaagaaactgtgctcggccaaatgaacgaaacttagtgggaggacgggcgtggtggctcacacctgtaatcccagcacttgggaggctgaggggggtggatcacctgagctcaggagttcaagaccagcctggacaacatggtgaaacgctgtctctactaaaaatacaaaaaattagccgggcatgatactcccactctcatagtgagagaaagattctttcttaaggattctacctgctggaaagcattatatactgccagcacttgttcaatacaagactttctggtttcatctccatgtcctgtttcccaggctggagtgcagtggtgggatcatagctcactgcagaaactcctgggctcaagggatcctcctgccttagcctcccaagtagctgggaataaaggcacatgccaacatgcccgactgtttttaaatttttttgtacatatggagtctcactatattgcccaggctgttcttgaactcccaggctcaagtgacccccccccacctcagcctcccaaagtgctgagattacagtcatggaccaatactcccagccctgaaacagatatatttcaaagggagaacatctaatgttcaagttggtatctatagagcagttaaccggaactatcatttagggtctgtgggattctaggacactaggtatgaaacaaatatgaggaaggtcagagaacaagctgacttaatgattaatgctgaaggtgctgcaagcttggtttaagttttcctcctcccatcctccctgatgaatttgataaagtttaaagggatggtttcaccaggggctttttccattgactgcaaggaggtcatcctgcctggtaaatcctcagtaggccaagcctcttatgtggcggaatgatccagtcgatgaggaaatatcaccacctgttatgttttacaattagaccatccaagggggtcagggtttccccaggtagtttggtgagagagagagagagtgtgtgtgtgtgtgtgtgtgtgtgtgtgttttgagacagtgtcttgctgaagtgcagtagcctgatcatagctcacagcagcctcaaactttgaggctcaagtgatcctcctgcctcagcctcctgactagctgagactataggtacacaccacctctccaggctaattctaaacaaagatgtatggagttgggagggtctcacttcactgctcagggtgatctccaacttctgtcttcaagtgctcctcccactttggcctcccaaaatgttgggattacaggcgtgagccatggtatccggcctcccaggctgttgttgaaaggtttttgcaatctctcagagttatgcagcagtttattccctcacagtgatactctcatcctttgaccccattttgcagcagtggttgagcgttcacttttctttccataagggggtgagcttgccggtgactctcttccccctcctcatcaatgacttctttgtcatcagagccttcctcttcataaattcccacggaatccaagttttcacgtcccaatcgggcttagttatgatagccacaggcccacaccagctgccacagcacccccgtcccatggaaaccgcccgactctcttctccccaagcgtcctgtcccgggagcccccatctctgctctcccgggctccgggccctagatccgcgctgctgtagagcccagttcccagagtagctccctccacctgtccacatccagctccagctctccaccctctctccaggcctggagttgctgcagtgtcactgatcaggggaccctcagctgccacctccaccgcgatctgaaagtcttttaaatgcacttaagttatcttagaattttcctcgcccattttatacataaacataggaggagagcaggggtttgagggtgtttgtctcatggaactgatcagtcgggtgagaagtagctgaataacctgcagggggcagcagagccccaggccagtgactccacgccgaggccagtgtggatcctgcaaaggaagagaaagagagattccctggggtcttcccgggcagcccgccctcccctacaagtggcctccagccgctcagagcagctccagaaggagtgtggattccgagaagctgcagagccctggaaagcagaagagacgtgcagacgcctttgtggggttctgtcctttctggtgttgtacctctggagcctggggctgtcttctgggcagggtttggggtttgacacgcatggggtcgctggaggcagagttgtttgtatatataaagagaatgtgtgaatatcaggctagagacagaattgtttgggggcgacacctggataaagggttcatgaagttgacagtttatttaggtcagaaggttaaattaaccccaggtgagagtttcctgctggtgaaaatgaagatctggaagcagggagcattttcacactgtgaggaggggatgggggtgtgtgagcaaggcttggccatgcctcattcccaattccggcccgctcaaggacatgtgcctctcctgatgcagtcgtgcctggcctggtctcggttcccctgctgctctgaggccagcagatggctcctatggacactgagtctgaaattccctgcacactcctgtgaccccgtgcagaacgaaggagcggggaaaatcccttgagtgaggaagacgctagtgttctcttatatctgtagcaagtctggctgaaatgcaaatatccaataatcagagtacaggaagcacctcgcccttagagaagctgtggctagaatccgtcaagtcagtctggctctgccgggcctgatacccaaggcttccgctgtcactcagaagtgaggggcggggcctagcattccatccaatcagaggtgccggggcagggccctgcccattgtttatccaggcacagagtgggtcgcattcctgtcctcacctttgtccttgcgcagccggtggttgatatccgctgtatccatccccgagagggacctggtacctctacccaggtttctatcgctctgtctcctgcgctgtgcccttctgtagtcacaggagctgtagagaggaccccaggacatctgaaagccaggaaatggtgcgtgtgcatagccggttgtcccgagacggggtagaggctgcctggaaccggccggaaccggctgcggcgggacccgggcctccctgcgggcgactccagggtctgggaccgagtcctcctggagctgctcggccctcggtcccctcggccgctggatggggctgggctggcagccgggaccccgggtgtcctgtcctgtccctgcgcggtgactgcggccccgccccggagccctctctgggcagttccgcgcccgcagccccgcgtctccccagattatgcggaagccacgagagggtcatgggggaaatcctgactcgtgtgtagggttcgtgcgtgggaggagcagtggtctgtggggcccccagttcccactttctcctgttaaaaattaaactgaagtacattaacaattaaagagttcatttgagcaaacagcaattcagtaatgagaaccacccagtcctggcttgtggtttgtcaactgaaaaagccaaacaatgtaaaataaagtttattcgtagccaaataggagagaccttggcaagggaaacacaaccccaagaagcctatagtgagtggtcccgaggcggctcaagacaatttggttttattcatttcagagagacaggaattgcagggaaaatcatgaatcagtgcctggaaggtgtaagttccattggcagaaagggcgggacctgtggaaggggggttagaaggcacaggtggttgagggattctgtaggtggcagttgattgagagtgtgaagtttgtctaaagtttggaggaggtaggaaggaatgctgaaggaagggggtctgttatctgccacttgattccatcccagccaaaaaacagacctgtttctcgagattttatgaattccaaggcatgacttacccttaccttgcgtggccttaggtcttgtttgtaatttggtatcttcttgccacaaggagtctgtttttccagtcagataatgtctgtttttacatgaatgtgcgtcagttgctgcatgtaaactcctaaagggagagggtataaggagacctgtctcacctgccatcctgtcatacagaggcactcaattttcagggttttttgggggttcccttggccaagagccagtcacttcacttaactgggaaggtactttgtttgtttttgtttttgtttgagacagaatctccttctgtcgcccaggctggagtgcaatggctggatctcggctcacagcagcctttgccttctgggttcaagcaattctcctgcctcagcttcctgagtagctgggattacagacatgcaccaccatgcctggctaatttttgtatttttagtaaagattgggcttcaccatgttggccaggctattctcaaactcctgacctcaagtgatccacctgcctcggcctcccagtgtgcggggattacagatgtgagccacctcgcctggccgcaaggtatgtttttaagtttgcaggttgaagactgggcttttataaggtacatgaggagacaaatgagataaatgcttgattggttgcagagatgcagttgccttatttggacttgtcactccgaaataatcgaaaggttcagatttcagctggaagagtttattcaagcagaaagatagcaatggcccaaacaggaaaaacacagactctagagaaaaggactcagtcctccaaaattggaagttaagttctggctttatattaccaggaaaagaggtcctcatcagaccccaagagggttcttggatctcacacaggaaggaattcaagacaagtcgcaatgtacagtgtgtagagagtttattgaaagctactctgggccagcatgatggcttaggcctgtaattcaagcacttttcaaggccaaggcgggaggatcacttgaggtcaagagttcgagaccaccctgggcaacatagcgaaacctcttctcttccaaaaataacaaaaattaactgggtgtggtggcctgtgcctgtagtcgcaggtacttgggaggcttaagtgggagaatcacttgaacccaggaggcagaagttgcagcccagccgaggactcgccactgcactccagtgtgggtaacagagtgagaccccatctcaaaaaacaaaaacaaaataaacaagaaagagttgaagaccaacctggctaacacagcaagaccctgtctctattttgtttttttttgagacggagtctcgctctgttgcccaggctggagtgcagtggcgcgatctcggctcactgcaagctccacctcccgggttcacgccattctcctgcctcagcctcccgagtagctggactacaggcacccgccaccacgctcggctaattttttgtatttttagtagagacggggtttcaccgtgttagccaggatggtctcaatctcctgacctcgtgatccacccacctcggcctcccaaagtgctgggattacaggcgtgagccaccatgtccggcccctgtctctatttttaaaaaaagaaaaaagaaaaagaaggaatgttctctgttacagagtagggcatcctcataaagcaagtggaggaacatactgtctaagtttttgttatgtaggggtcttgtctatgtaaagactaaactaagctgtgcctacgtgcatgtgggctgacagcgtcacaaaatttattactctgttgatttaaagaaaactatcctttaccttttagcacacaagtgcattaaaacataactataattatcttgaaagcacatactattatgagtattgggacatccggatgttctgtcgttgtgggagtgtaaggatacttgcaggcatcttcaggctgttttcttaatgtcaaacatgttatgaccatgggttgtgactggcaaggagtgtttcttgttagtctcaagatggagctgattggtctttctctggctcccctaggcacttgcttccctaacacttatataggcaaaaggcaaataaatgtaacaggattacattttccatagaaggctgatgtatgaggtacaataatttaatttttttttttctttgagacaatgtctagctctgtggcccaggctggagcagtggtgcgatcatggcttactgcagccttgacctccccagctcaagcacctcagccttcccagtagctgagagtacagttgcccaccagcacacctggctaattttttgtattttacagaggtggggtctcgatatgttgctcaggctggtctcttgctcctggcctcaaacagtcctccttccttggcctccaaaagtgctgggattatagacatgagcaaatgcatgtggataacaacttaatttgtagtggtttgcttttttcccccagagcttgttttcttttctttctagctggtttatatttccttttcaatttaaaaaagtgaatttaatattctagctgaagacaacatgatagccatggagtctttgtgtgagaaagttaagagggaaattagtgtactatagagatcagtagtagagaggggcctggcgggatggctcacacctgtaaccccagcacgttgggaggccgaggcaggtggatggcttgatctcaggagttgaagaccagcctggcaacatagtgagaccccatctcaattgtgaaaaatcatattaaatttaaaaagacagtgacaagggaaagggtctttcctgtttcccttcagtcatttacaacattttacaaaacactataggtaagaaagaaggcaaatctgtaatcagggaaaggagggttccagctagctaggtgaaagttgtgtgtcatgtgactcaaccccatgatcacattgcttcaagatgatgtagagattcatcagcttaaatttttgaattacttggttgtttttgcttgtttgtttgttttgagacagggtctcactctgtcggctaggctggagtgcagcggcgtgatctcagctcactgcagcctctgccttctgggttcaagtaattctctggcctcagcctttccagtagctgggattacaggtgcgtgccaccacactcggctaatttttctatttttagtaaagacagcgttttatcacgttcgccaggctggtcttgaacttctgtcctcaagtggtccatccaccttggcctcccaaagtggtgggattacaggtgggagtcactgcaccgggcctgacttacttgttcacacagcctatataggtagaaaatttctagttatgtaatcagcggttaattggtggattgtgcctgattaagcataaatttcatttccctatacattagtaattttcacgagttgtatttaaatatgatttcaggatccttaggtaggaccttaggacacctcacacagtttggcctcattgcttcttatttaaattttttcacattctccagggcaactggtttccccttacattttccaaatatatgggatgcagcgtctcaaatcctccaccctcataccacagcctaactcttcaagggcttgcagtgaaatctgtttctgaacatttcacatgagaggaaagcagagaataaccactagacatttgcctgaaaaatcctttctgcctctcctccttttatctttcctagacacagacaccttatcaggatgtctttgggatgaggttcctttctggaaactttacagggtgatgtgtcttcagtacaccctcctatcttttcctggttttgggttttagaattgcctggggctggctcaagatccccacaactgccatgtctcctggagggtctcatgggtattagtgccttaggggagtgggacctcccgagggagcagctgaatgccttatggtggaggagatgcctggtatactcttcatctacataaccaattcttggggtgctcagcttctgtctcccaactccactttccattaattggagacacatggctgttctgccaatcggatgttgctaatgaggaaaaacagagatgattcctgtcctctggattgtctcaactgtgaagagagaaatatcccaaaagacaaggaaaggccactccaacaaggatgtatttagctgtcccacagggaggtggtcaccagaatgcagctgagtaagtcccatatgtgagttaaccacatggaggaactgggaggaggtggagaaccagaaactgttcagagtttgagtaaagttttcttctgttataacaacgttaaatccataaagaaaatgcatgctaaggtaacatataaataaaagaattcactgtaacaggtaactctagaattaattaaattattgtatatggagatgatgagtagtagattgattattctcctgtagataaccatttgtccctgctttttctgttaagtgttcaccacttgtatcattggctggcaatacctggtttgtcatagtttcatattaccttaaatagatgtccagagcaggtgcagtggctcacacactttgggaggctgaggctggcagatcacctaaggtcaggagtttgagaccagcctgaccaatatagtgaaaccccatctgtactgaaaatacagcattagctgagcatggcagcgcatggctataatcctagctacctgggaggctgaggcaggagaatcgcttgaacctgggaggtggaggttgcagtgagccgagatcccgcctttgccctccagcctgggcaaggagagtgaaacctcatttcaaaaaataaaaaaaaaactaaaaaactagatgccctggtctcacaatttgctgttttccattggtctgtccttccatctctctgttaataccattttctcttaattagtgtagagttcaaagctgcagtgtatagtagggatattgcttctctatcttagtcatcttgggctgctacatcaaattaccatagactgggtaacttaaagaataaacatttgtttctgacagttcttgaggttgtgaagtccatgttcagggagttggcagatctagtgtctggtaatggcccgcttcctggtttgcagatggtcatcttgtggtttcttcacatgacagaaaagagaggaagctggctgtcctgtgtcttcctataagagcactaatctcattcggaaagcatctacctttatgctctcatctaatcctaattaattcccagagatgtcaacttctaatactatagtggggggtaggttattaatgtgtgatttttttagagtgatgcaaatattcatgccgtaacaccctccaaccatattctatagagcatcttggctgttcttagtcattgtcttctatttcagtttttagaagtacttttttcttaattttagtgaaaaaaacaaactgccttataaatttcatggaataaaatataactgtagtcgtatttcaaagaggttacatcatagtgttatttaatctccttttaaggacacatgacatttttccatttattgcattttatattgatgtttttcagtgtagactttttgcataataatcattttatatccttcctgagacttttttgggcttcaagaaaattagttttaatagaaatttgtggccgggcgcggtggctcacgcctctaatcccaacactttgggaggccaatgtggatggatagcctcagttcaggagtttgagaccagcctgacaaacgtggaggtttccatgtctactaaaaatacaaaattagccaggcgtggtggcagaggcctgtaatcccagctactcaggaggatgaggcaggagaatcgcttgaacccaggagacagagattgcagtgagccaagatggtgtcattgcactccagcccaggcaacaagagcaaaactttgtctcaaaaaaaaaaaaaagaaaagaaaagaaattagtccagcctgggtaacgtggcaaactttgtcaatacaaaaacatacctggtcatggtgatgtgtacctgtagtcccagctactcaggaggctgaggtagaaggatctgttgagcctaggagtttgaggctgcagtgagctatgattgcaccaccacactccagcctgggcaacagaatgagcctgagaccctgtttcagaaaaaaaaagggaagaaaagaaaaaagaaaaaaatgagtttcaatagagtatgttgtcttttaaaaattacattcaacaggttgtggctgataattgaaattcactgagatttatttttgtataaagtgtgcattctagaaacttagtaaaaatattacatatgcacaaaatacataaaagaattgcacaatgaatccaaataatgatggagccagtattgggaataagataattgccttactttttatactttcacaacctgggtatgcatccccatcagtatattttatttttgcacattttttatgcaaatgataaccaatgtgtgatattttatattggattttaactcagttatgaaccttacatggaatgatagttaattcactttcttatttcattgattttattatttagaacagtggttgtttgcccaaaacgttgagcaaataatccacagagttcccacatttttcttccaagctcataattccccctgttttaaacatcttgactggccagatgctgtgcctcatacctgtaatcctaccacttagggaggctgaagcaagaggacagcttgaactgcagtgttggagttcagcctaggcaacataacaagaccctgtttcaaaaaaaaaaaaaatcattttaaaccatattgactgtgtgtagtatatcccacaattgatgcaagaatatattacatgtgaacacgatggaaattgaagaaaccaatattattattacctaaagtccatcttttacattaaacttcactctttttgttctgtggtttaagacaactacatgtgtcttgtatccaccatcacagtcttatacagaaacgtttcactgccttcaaaatcccctgtgctcctcctaattctatctctcccctccctcttttgccacccctatttatccctggcaacagatgatgatgttccttcctctagagttttgcattttccagaatatcacatatttggaatgatgctgtaagtggccatttcagacttgcttctttcatgtaaaaatatgccttgaaggtctctcgatacctttgttgcttgacgactcatttattttttatttttatttatctaaaaaaattttgttttgtgagagacagggtctcaaactcctcagctcaggtgattctcccacctcagcttcccagagtgctgggattcctcttgtgagccaccacgttcggccactcattttctttcatcactaacattccattctatgggtgttaccatagtttgtttctttattcacctattgaaaggctcatcctgagcctggtgtgatgcctcatccctgaattcccagcatatgggagactgaagtgagaagattgcttgaggccatcagttagagaccagcctggtagatacagtgtgagaccttgttaattttttttttttttttttaaagactcaccttgtttgattctagtttttggcagttatgagtaaggctgctaaaaatgtttgtgggaggacttttgtgtgaacatcagtgttcagttcatttaggttaatatgtaggattgagactactgaatcagtaagaccatgcttattttcttcagagctccacagactgtcttccaaattggctgtagaattttccattcacatccatagtgaaggagagttcactgtctccagcatttggaagtgtcagtgtttgggatttaggctaccccaccaggtgtttgctggtgcctcattgttttctttctttctttctttccttctttcttttctttctttctttctttctttctttctttctttctttctttctttctttctttcttttctttctttctttctttctttctttctttccttccttccttccttccttctttctttctttctttctctctttttttttgttttttgttttgtgtctagttcttgttacctaggctggagtgcaatggcatgatctcagctcactgctgcctctgcctcccaggttgaagcaattctcctgactcagcctcccaagtagctgggattacaggcgtggtcctccactcctgataaatttttgtattattagtagagatgacattttaccatgttggccggggtggtctcaaatttctgacctcaggtgatccacccgccttggcctcccaaaatgctcaattataggtgtgagccactgcccctggcctgttttaatttactctttaataacatgcaatgttgagcatcccgtcatatgtttgtttgacataattacattctttagggggaggtatagttggaaatattttgcctttttttgggcgggggggtggggtgtaatctggctctgtcgcccaggctggagtgcgggggcatgatctcagctcactgcaacttccacctcccagattcaaacaattctcccacctcagcctcccaggtaactgggactacaggcacatgccaccacacctagctaatttttgtatttttagtagaaatggagttacaccatgttggccaggctgatcttaaactgctgacctcaagtgatacgcctgccttggccttgcaaggtgctgggattacaggcatgagccaccacacctggctgctaccatgattgattttcattacttactgtgaaacaaaacttaaaacctatcagcttaaggaattttacatgtacagttgagatagttggagaaatctacataagttctctaagatgaattctattgtgttctgccttttgcaattatcctgatgtttcttgcatgtcatagtacgggccaagatgttattttcttttttttttttctcgttgagactgagtgttactgttgttgcccaggctggagtgcaatggtggaatgtcagctcaccacaacctccgcctcccgggttcaagcgattctcctgcctcagttctcctgagtagctgagataaaacgcatgtttagtaaagatggggtttctccatgttggtcaggctggtctcgaactcccaacctcagatgatttccgccccacccacaccccccaaagttctgggattacaggtgtgagccactgcacccggccaagatgttattgatttttttttttattttattattattttttgagacagagtcttgctctgtcgcccaggctggactgcagtggcgcaatctcggctcactgcaagttccgcttcccgggttcacgccattctcctgcctcagcctcccgagtagctgagactacaggcgcccgccaccgcgtccagccaatttttcgtatttttagtagagacagggtttcactgtgtcgatctcctgacctcgtgatccgcccgcctcggcctaccaaagtgttgggattacaggcgtgagccaccgcaccccggcctttaagatgttactttctaagactaaataatatcccattgtatgtgtatgcttactacattttgtttatccattcagtcatcagtggatatgtgggtggctgcactgctcattactgccaccccaggaaggttgtatagtggttaaatctatgcttattacacctggatatatacacctggatataaactggagtttcttgtttgccctcttgtgtacttacagtgccaggtttttcttaggaatgtcccatctgcccttgttatcagcatctatctagctacactctgacaggataactgcaaactgaatgattcctgggcatcataatggatgtttctttctacttaggtgtctcccctcctctctgcttctatctagcatgccggatttgggtggtccctggggtgtgggatgtcccagggactctctctcctgctcttgggtagctatctgccttctctaacaatgtcatcaaagattacactttgggaacaggcattttcaaggatacacagcctcaggactgctaatgttaacttttttctgcatattaattcataggactctattacgacaggtgctacagacccacagttcaaagagacagtagggacagcccaggcagctcccttttctccttagattcagtgaatgcacacattttcccaacccactgtggctttaccccttgttgagttctagcatcacaattgctttatgaaccagccgagcatggtggcacatgcctgtggtctcagctactcaggaggttgagtcataagaattgcatgaactcaggaggaagaggttgtagtaagccaatattgtgccactgcactccagcctgggcagcagaacaagactctgtctcaaaaaaaaaaaaaaaaaaaaaaaattgctggccaggtgtggtggctcatgcctgtaatttcagcactttgggaggccgaggctggcggatcacctgagatcaggaggtcaagaccagcctgaccaacatggagaaaccctgtctctactaaaaatacaaaattagccgggtgtggtggcgcatgcctgtaatcccagctactcgggaggctgaggcaggagaatcgcttgaaccccggtcatgagccaagatcgcatcattatactccagcctgggcaacaagttgttgttttgaaaatccatctcaaaacaacaacaacaaaaatgctttatggaagaaagtacagaaagcgagaaagggatgtgatgaccaaagcagggaataaatgtttggagtccacggcaacttcttgggaatagagtctaggcccccactgctgtcactctcacccagcctcctctacacatgtgagatgtttcaggaccctgtggcctgtgaggatgttgctgtgaacttcacccaggaggagtgggctttgctggatatttcgcagaggaaactctacagggaagtgatgctggaaactttcaggaacctgacctctataggtaaggatgacaatattccttccctcagtccattagtgaaccagtgtttctagctcatgaatgctgttgagtcatttggaacatagacaggaaatactttgatgaataaatgaggcatggctgcagtaaatcatagacatagaatctaataattttttcacagttttatattgcttcaggactacttttctgtgtctgtattttagggaaaaagtggaaagaccagaacattgaatatgagtaccaaaaccccaggagaaacttcaggtaattggcacttaaagagaaagcagtgtctctagatgattttagtatatgataatatgttgaagagaagtaaaacaaagaactaagtccagtatcaaattcatctcttcttagaatattttctcaaaatcatatatttacatgtgactaagtctgagggctcactcctgtaatcccaatcctttgagaagtggagataggaggatagcttgaggccagcagttcaagaacagcctgggcaacataatgagaccacaaatcaacaacagcaaaaaattagctgggcattgtggtatgcatcgtagtcctagctactcaggaggctgaggcagaaggatcactcaagcccccaggagttaaaggctgtggtaagcaatgatgatatcactgtactccaggatggtcacaggatgagaccctgactcgaaagaaaaatcacacagagtatttagtacttgtaaaatagtttacatgggaatagtattaagccccttatgagtatttttttaaacaataggtatgactatgtcaccttgtagaacatgttgtccatttaccttcaaacaattcagccagggcagaaagcctacaccttgatggaccatgttaaaaatgcaagtgcaatacttgattaatacaaaattactcataaacccttcataatgtgcttctcacttttgacaggagtctcatagaagggaatgtcaatgaaattaaagaagacagtcattgtggagaaacttttacccaggttccagatgacaggctgaacttccaggagaagaaagcttctcctgaagcaaaatcatgtgataactttgtatgtggagaagttggcataggtaactcatcttttaatatgaacatcagaggtgacattgggcacaaggcatacgagtatcaggactatgcaccaaagccatataagtgtcaacaacctaagaaagccttcagatatcacccctcctttagaacacaagaaaggaatcacaccggagagaaaccctatgcttgtaaagaatgtggaaaaacctttatttcccattcaggcattcgaagacgcatggtaatgcacagtggggatggaccttataaatgtaagttttgtgggaaagctgtccattgtctcagattatatcttatccatgaaagaactcacactggagagaaaccgtatgaatgtaaacaatgtgttaaatcctttagttattctgctacccatcgaatacatgaaagaactcacactggagaaaagccttatgaatgtcagcaatgtgggaaagcattccatagttccagttcttttcaagcacataaaagaacccacactgggggaaagccatatgaatgtaaacaatgtggcaaatccttcagttggtgtcattcctttcaaatacatgaaagaactcacactggggagaagccctgtgaatgtagcaaatgtaataaagcattccgtagttacagatcctatcttagacataaaaggagtcacacgggagagaagccttatcaatgtaaggaatgtagaaaagcattcacgtatcccagttcccttcgtagacatgaaaggacccactctgcgaaaaaaccttatgaatgtaagcagtgtgggaaagcattatcttataagttttcaaacacacctaagaatgcgctctggagaaagaccttataaatgttagatatgtgggaaaggcctttattctgccaagtcatttcgaagacatgaaaaaactcacactggagagaaaccctataaatgcatgccatgtggtaaagccttcaatctttccagttcctttcagtatcatgaaaggactcacactggagagaaaccctatgagtgtaagcaatgtgggaaagccttcagatgtgccccacaccttcgaaggcatggtaggactcactggagagaaaccctatgagtgtaaggaatgtgggaaagccttcagatctgcctcacaccttcaaattcatgaaaggacacaaacacacataagaatacactctggagaaagaccttataaatgtaagacatgtgggaaaggcttttattctcccacgtcatttcaaagacatgaaaaaactcacactgcagagaaaccctatgaatgcaagcaatgtggtaaagccttcagtagttccagttccttttggtaccatgaaaggactcacactggagagaaaccctatgagtgtaagcaatgtgggaaagccttcagatctgcctcaatccttcaaatgcatgctgggactcaccctgaagagaagccctacgagtgtaagcaatgtgggaaagccttcagatctgccccacaccttcgaatccatggtagaactcacactggagagaaaccctatgagtgtaaggaatgtgggaaagccttcagatctgccaagaaccttcgaattcatgaaaggacacaaacacacgtaagaatgcactctgtagaaagaccttataaatgtaagatatgtgggaaaggcttttattctgccaagtcatttcaaatacctgaaaaatcttacactggagagaaaccctatgagtgtaagcaatgtgggaaagcctttatttctttcacttcttttcgataacatgaaaggactcacactggagagaaaccctatgagtgtaagcaatgtggaaaaaccttcagatctacctcacaccttcgaaaacatggtaggactcacactggatagaaaccaaagcaggtgaatcacctgaggtcaggagttcaagactggcctgatcaatatgatgaaacccctgtctctactaaaactacaaaaattggccaggcgtggtggcctgcttctgtaatcctagctagttgggaggctggcacaggagaatcgcttgaatctggggggcagaggttgcagtgagccaagattgtgccattgcactctagcctgggcaacaggagcaaaactccgtctcaaaaaaaaaaaaaaaaaagacttggccttgtggtgaggggatgtcagctctagactcctggagctgtttttgccttattctctaaagactaaaatatttcataaaatgtatgggtgctgtttaccagaaagtacgttgggtaaaacatagaaattcatttataccttagaaagctatttttttcaggttggtttagtgagtcacaggaagctaataaattacaataataatgtaaattgtctaaatacagccttttctttctctgataatgtgctgttgatactaacttgtcaacagcctgtttatttcagccatgtaaagttaatggcaacatggaaaagtcacttttatatgttatgcaatggcatggaaaaattcattttcattaaggttccaatgaagctgctcttcagaaacgcttatttaaaactccctaaggtcaaagtccaggcatcacgggatgcagcatcaatcactgaccaaaccctgtctgtgtgtggagatgacatacccagtcccagataatgtatccacatcagtgaagggtggaatcattgattgtcagatcacacagcatgattcacagcagggaagacagggcagtgacagaggtgggggcacctgagcaggtacggtggctcacacctgtaatcttagcactttgggaggccaaggagagtggatcacttgaggtcaggagttcaagaccagcctggccaacatggtgaaaccttaagaaatagataaattagctgggcatcgtggtgtaatccctgtaatcccagatactcaggaggctgaggcaggagaatcgcttgagcctgggaggtggttgttacactgaactgagatcacaccattgcactctccaacctagtcgacagagcaagactctgtctcaaaatgaaaaaaacaagagttgggtgcacctgaatccaacccctgccttatcctcccttgaaggccaaatacaccctgacacttttaaccaaacagtagaaacaacaccatccacttgaccccaaatgtgactttccacaggatgcaagcacaatgttggaatggccaatgacagtgacaatgaaagtgcagggtgagggtgatgaacaggacacactggagagcctgacattggcctagactatggaggtgtcttgatgtttcacaaaaagcccaaggaccaacccaaagagacactggagcacaggcccaaagggtgttcatatgccaggaaggctactaattttagaaggcagtgatggtgcctgtttgagtccggatgctttataacttctgcttttctgcatctgcttagacaaagaaatctgcagtttttgagtttcagtgtttagaagtaagttattttagcaatctacacacttgtggtttattctgagctaacttcagacacacagctacagatagggaatatcacgagtatttccaaggctaaaagtcttcatgaagtcagtgggaccctctcatgggagggttttaagacccacaatcaaaaaggtggggaaacattagagtggaaagagggcagcaggtcaggggccttccccagaggtctaacacacccaacattattaccctggatgaaaaccaatacatatcataacaccacacacactcttcaatgtttcacagacaaaatgaaatgtattcaaagctaagcttccagaattccactttacacaataaggttttaatatcactctgtgttgatgttaggcaattactaaatagcattttctggttatctatggaaaataccttgatttctgggatatgaaaatgctcatttttagatatgcttgtttttgaactttttttaataaaataaggtgagaaaacaggaaaaaaattttcagatcaaggaacttaggcgaattaataggagaaaagtcatacaaatttatttaacatgtatatatgggagccttcagaatgaggacccacccaacaataagacaaaaaagcttacataccattctgaggccaggaaaaatgcagacttggcatggccaaaaaaattccaggtttggtggggaagtcatttttaatggcaagacagattatgctaaaggaaaggaagaagcttggctagcaaaggagaccttgttatgtagatgaaggctccctcagagagaataggtgggaaatgctgcttttcagacttttatttagaattttaagtaatagagtcaggattatgctgtgttgcccaggctgttctctaattctttgtctcaagcagtcctcacagctcagtctcccaaagtgctaggattccaggcatgagtcaccatgtccagacagggtttgtccccttgtaaagaattattcattgctgggcacagtgattcacagtgacgtctgcctggcatctgcctgtaaaggaagcatggcaccagcatctgctcagcttctggtgaaggcctcaggaagctttcaatcatagcggaaggtgaacggggagcaggcagtcacatggcgaaagcaggagtgagacagagagagtggtgtaggaaggtgcagctcactagaactcactgattatcacaaagacagcaacaagccatgagagaaacaagccataggtccccctgacccaaacaactcccatcaggactcacctccaacactggggattgcagttcctcatgacattgggtgggaacatacattcaaactatcacgtgacaatattacttccctcagtttattaaagaacaagtgtttctagctcttcagtgctgttcagtgatttggaatatggacagggaaaactttgataaatcaggaatggctgcagtgagccatgaacatagaatctaataatttttaaactaattttataatagctgggcatggtggctcatgcctgtggttctagcactttgagaggccaaggtgggtggatgacttgaacccaggagtctgagaacagcctgggcaacatggtgaaaccctatctctacaaactttttagccaggatggtgacatgcacctgtaatcccagctacttgagaggctgcagtaggagaatcacctgaacccaagaggttgaggctgcagtgagctgtgatcatgccattgcactccagcctgggtgatagagtgagaccctcatctccaaaaaaaaccccataattttataatcaggactattttttatggatctgtattttaagaaaaaaatggaaagaccagatcattgaagatcagtacaaaaatctcaggaataatctaaggtaagtttccctcacaagataaagcattctctctctagaaaatcttatactgcctgaaaatgttttggtttttttggagacaagagtttcactcttgttgcccagactggagtgcaatggctcaatcgcggctcatcgcaacctccgcctcccaggttcaagtgattctcctgcctcagcctcccaagtagctgggattacaggcgcccaccaccacgtctggctaattttgaatttttagtagagatggggttactccatgttggtcgggctggtctcgaactcctgtcctcaggtgatccgcctggcttggcctcccaaagtgctgcaattacaggcgtgagccattgtgcccggctgaaaatgtttaaaatatgcaaataaaagaaataagaccagcatcacatttatttactcttagaaaattttctctaaaaacataatatttaaatgtgacataggctaggcacagtggctcacacctctactcccagccctttgggagaccaaagccagatgattgcttgaggctaggagtgagaccagccaaggcaacatggtgatacatcacctcattaacaaaaaatgttagctgcgcatggtggcacttgcctgtagttcctgctatttgggaggctgaggcaggaggatggcttgagcccaggaattccaagctaccatgaaccatgctcaattagacccctgccttatcacaaggacagagggctttctgtatcctaaggttcttgccttggtatactggaagaattgtatcacacgtgggcttggagaatgagtgcaagttttttctttttttttctgagaaagggtctcactcttgtcgcctaggctggagtgcagtggcctgatctcggctcactgcaacctccacctcccaggttcaggtgattctcctgcctcagcctcctgagtagctgggattacaggcacctgccaccatgcccagctaatttttgtacttttagtagagatggggttttgtcatgttggccaggatggtctgcaactcctgacctcaggttatccccccatctacgcctcccaaaatgctgggattacagatgtgagccactgcgcccggccgaaaatgcgaactttctcctttgggtactaccattttggtgggcatcagatccatgcccgagctctgtgggcgctgctgcctctctccacctcaggcaccacatcccaggagccccaatcccactgcctggcttgtgctttagaacagctgctgctgcagggccctcagctgccactaccaagttgcgatttagaagtcttttaatgcatttaaatatcttagaatttgtcttccccactttatacacacaatcatgaggagagcagggactctattggtgtcttattcacacagtgggattgagggtgtttgtctcatgaaactgatcaatgaagtgagaaacagctgaataacctacagggggcagcagagcctgaggccagtgtgggcctgcaaaggaagggaaagggagttccttgggggcttccggggctccccgccttcccctgcaggtggcctccagctgcccagaacagctgcagagagtgtggattctgagaagctgcagggccctggaaagcaggagacccacgtgcaggtgcgcttagggggttccatcctttctgaggttgcccttctggagcctggggccattttctgggaagtgttttggttttgacatgtatagggtcgctggggtcagaatgtaattgttacatatgaagaaaatctgtgaaggtcagcctcagtgagacttgttgggtttgtcttataacagggtttatgaaattgacagtttatttaggtcagagcttaaattatcaccaggtgagagtttcctgctgaggaaaatgaagatctggaaggagagagcatttctacactgtgagggggcgcggagtgggggtgaggggagcgaagatgaggatgctttggctttgcctcatctgcatttctggctctctggaggacatctgcttctccctcctggtgtggtcattcttggcctggtctgggttcccttcctgctctgaggcaaagggggtggctttgtgggggcaataggcccttggtgtctgtcctaaaggtttgctgaaaactcattgacatgaggcagttggagtaactctgaaaaggcatacaaatttatttagtgtatacacacaagagccttcagaatgaagactccccagcaataacacagaaaagcttatataccatcctgaggacagcaaagaatgcagactcattatggtccaaaaatcacatgttatgttggcaaatcggatgtagtggcaagacatcttctgagagagggaaagaaaggggcttggctagcaaagatggactgttatataaatgaagcctctcacagagagaagagaaatgcttcttttccaactttttaacatttttctttttatttggatacttaaataatgaaggtgggagtctccctgtgttgaccaggccttcaactccttgctttaaggcagggatgtccaatcttttgccttccctgggccacactgaaagaagaattgtcttgggccacacataaaacaaagctgatgagctaaaaaaaaaaaaagaaaaaagaaaaaagaaaagaaagaaaaaaaatcgcaaaaaaactgtattttttttttttagccagagtctcactctgtcgcccacactggagtgtagtggtgtaatcttggctcactgcaacctccaccttcgggttcaagcgattctcctgcctcagcctcctgagtacctgggactacagacgcctgccaccacacctggctaatttttgtatttttagtagagatggggtttcacatattggccaggctggtcttgaactcctgaccttgtaatctgcctgcctcggcctcccaaagtgctgggattacaggcgtgagccacagtgcacggcagaaaatcgcaaaaaaaatttttaaatattttaagaaagtttactaatttgtgttgggctgtattcaaagccgtccttagcccgcaggccataggttggacaagcttgctttaagggatcctccagcctcggcctccggaattgctgggataggaggcgtgagtcacggcttcctacctgtgttcaggttttaaagacgtcagaccccgaatctctactagttccagtgaagggaaataagcagggaggaggccatggctttgttaacggagattctccgcagatgcgcattttcctcccaaaggcacctttgcaagaccacactgttggccaagcggccacgatttcaaaatatgtcaaaggagtaaccgggcgcggtggctcacgcctgtaatcctagcactgtgggaggctggggcggatcgcttgagctcaagagttcgagaccagcctggctgaaaccccgtctctactaaaaatacaaaaattaacaggggtggtggagcacacctgtagtcccagctactagggaggctgagacagtaaaatcgcttaaacccaggaggtggagattgtcgtgagccaggatagcgccactgcactccagcttgggtgacaaagtgagacccagtgtcaaaaaaaaaaaaaaaaaaaagtcaaatatattttggagtaaaaaaatttaatttccttcacctccgttggactcttgagtctggaattccctacacacatttgtgaccctgtgcaggacgaaggaccccattgagtgaaaaagacaacagtgtcccttatagcagttaggagcaagtttggctcaaatgccagtatccgaagagcagggagctgaaagtgagcccatttagggaacctgcggctggaatagcagcgaccggctctgcagcgccctgttacccggggcttctgctgtcactcagggctgagggggcggggtaggatgccctatccaatcggggtgctggggcggggccctgccaactgtttaatccgccggaaggagggcgcagcattgccggtcttctcattgcctggctgctagaggaaacccgaagtcgggattctttctttcctgctctgagagggaccaggtccctcctccgtagcttttgtctctctattgcctgcgccgtgtcctggactgctcacgggagttctgcaggagacgccggaatatctggaagctgaaaaatggtgagtgtgcggagccggaaaccccgaggtgggtttgggggttaggggacggtctagtcagaaccgcggaatcggaacgcgggcctccatgttgcgactcgggggtctgaggcccgagttcccctggcgcagctcagccctgggtccccttggcctcagggtgggtctgggcggcagtcgggaccccaggcgtcctgtcgtccctgctcggcgactgggacccctgccccggagctctctctggggagctctgcgcccgcagccgcgcgtctccccaaattgtgcggaagtcgtggagggaatcccgcctcgtgtgtggggttcccagtcgcacgtttcttctgttaaaaattaaactgagacactgttaacaagtaaagagtattttgggtaaacagccaatcatgaaggagaaacaccgggtcatgacttgttaacggaaaaaaaaaaccaaacagtaaaataacttaaagaagttttattttgacctggcgtggtggcttacacctgtagtcctagcactttggctggccgagatgggtgggtcacctaaggtcaggagtttgagaccagcctggccaacaaaccctatgtagggtccagccctactgggcctgtgggtttttttcctcgtgtgcggagacaagagatcatagaaataaagacacaagacaaagagaagaaaagacagctaggccggggggaccactaccacctaggtgcggagaccggtagtggccccgaatgcctggctgcgctgttatttattggatacaagacaaggggggagggtaaggagtgtgagtcatctccaatgataggtaaggtcatgcgagtcacgtgtccgccagacagggggcccttccctatttggtagctaaggcggggagagaggacagcttatgtcattatttcttctatgcatttcaaagactttagtactttcactatttctgctgctgctatctagaaggcagagccaggtgtacagggtggaatatgaaagcggaccaggagcgtgaccgctgaagcacagcatcacagggagatggtcaggcctccggatggctgcgggtgggcctggctgatgtcaggccttccccgagaggtggtggagcagagtcttctctaactcccccggggaaagggagactctttcccagtctgctaagtaacgggtgccttcccaggcgctggcgttaccgctagaccagggagccctctagtggccccgtccaggcgtaacagagggctcacacttgtcttctggtcacttcttaccgtgtcccttcagctcctatctctgtatggccatgtttttcctaggttataattgtggaagaaatataattataatattggaataaagagcaatgctacaaactaatgataatgatattcatatataatcatatctataatctatttctagtataactattctttttctatatattttctttattatactggaaacagcttgtgccttcggtctcttgccttggcacctgggtggcttgccgccgacatctcccccgtttttattgactaggatcgtcatcgccatcattgcttgtcgctgacttcggacttgtcctcggactccttggagacatctgcagactagaagtagacaacataaacataccaatattaataatgccagtgacaacaatgatcctccgaggggtttgatccatttaaagggattaagatcagacaatcttttagttattccctcaaaaatgtctgagccagggcagtagttaaatgagactgtgaggcctcaaaaatttgttctttaagttttgaaatatttaaggttaaattatcatcctattctaaatgatgaggttattgaacaattatgaaaatgttgcctagatgcttgggataagattcaagatgatggcaaagtatgtccatcttttatgcccgtcagacagggacaacatgaaccctatgcagacttcattgcccatcttcaagacgcagtagaaaaagctatccctgatagccatggccaatgacttcttgtagaacttatggcttatgatcaagcaaatccagatttcttctccttatcactgtttaggaatgcagctagaagctagaagacaagaattaagccccacgatggtcacttctcatcgtgtcccttcagctcctatctctgtatggcctggtttttcccaggttataattgtagaacaaagattattataatattggagtgaagagcaatgctacaaactaatgattaatgatattcatatataatcgtatctataatctatttctagtatattcttattctatatattttctttattatactgcaacagcttgtgccctctgtctcttgccttggcacctgggtggcttgctgcccacaaccccgtgtctaaaaatacaaaaattagctgcgcatggtggtgggtaccagtaatcccagctactccggaggctgaggcaggaggatcgcttgaacccgggagatgaaggttacagtgttatgaaagaccttggcggagggaaacaaccccaggaagcctcgagtaagtggtcccgaggcagctcatgacagtttggttttattcatttcagggagacaggaattgcagggaaaatcatgacttagtgcttggaaggtgtgagttcctttggccgaaaggcgggacttgtggtaatggggttagaaggcacaggtggttgagggattctgtgggtggcagttggttgagagtgtgaagttttggtctaaaattcagaggtggataaaaaggaacaaactaatggcatttgcagcaacctggatggaattggagactattctaagtgaagtagctcgttaaaatggaaaaccaagcatcacttatgttctcactcataagtgggagctaagctatgaggatgcaaaggcataagaatgatacaatggactgtggggactggggaggatgggaaagggtgggaaggtgggtgtgagggataaaagactacacattgggccgggcatggtggctcacgcctgtaatcccagtactttgggaggctgaggcgggcagatcacctgaggtcaggagttcgagaccagcctggccaatattgggaagccccgtctctactaaaaatacaagtgttagctgggtgtggtggcacgtgcctgtagtcccagttactcgggaggctaagacaggagaactgcatgaacccaggaggcacaggttgcagtgagtcgagatcctgccactgcactccagcctgggcgacagagcgagactccatctcaaaaaccaacaaacaaaaaacccaaaaaccgaaagactacaaattgggttcagtgtatactgctccagtgatgggtgcaccaaaatttcacaaatcaccactaaagaacttactcatgtaaccatataccacctgttccccataaacctatggaaatatgtatatatatgtatttaaatttttagaggcggtaggaaggaatgctgtaggaagaggggctgttatttgtcacatgattccatccctgcccacgaaacaggcctgtgtcaccagattttatgaattctgagacatgaattacccttttccttaagtccctttagatggtgtttgtaatttcatgtcttactgccacagaatctgttttgtgagtctgacgatgtctaatgaacatgaatgtagatcagttgctgtgtatatattctaaaagagagacagtataaggaggctactccgatcttcccgtcacagcggggaactccattttgagagtttttattggtgatcttggccaagagcaggtcagttcacttagttgttggtgggggagctgcttaattttgttaacagcttataggttggaggacaggcttttataatgtgaaaggaaaataaaacctcaggaccccaatttttataccaaaaggaaaatattaagctaaaagctgagtcaagcaagaagttgcctttctttttgttgctaagtgaatagctacagataaaaagttatatatcttggactgggcacagtggcttacgcctgtaatctcagaactctgggaggctgaggcaggcggatcactagatcaggagttcgagaccagcctgaccaaaatggagaaaccctgtctctactaaaaatacaaaacttagccaggcatggtggcctgtgcctgtaatctcagctaatcaggaagctgaggcaggagaatcacttgaacctgggaggcagaagttgcagtgagccacgatcgagtcactgcactccagcctgggtgacagagcgagactgcatctaaaaaaaaaaaaaaaaaaagttatatatctccacaggaaactgtgtatctcaagtaaagtgttgatttactgggtgagacacaaatacctaactgactattctcttgcctgcttctttcctgttgcagtatgtggattacatactaaccctccctcttacctatccagcacacttttcccctttatatattgaagtcctcaaaattgtccttggagaaagtcacagactgttgctgtgattccgtgttgatttcttctgggtctattcttaaccttgggaaaataaacttctaagttgatccagaagcatctccaatatttttggtttacaatatgttgcatgaggagccaaaccatattaaatactagattgtttacagtgatgcagttgccttctttggacttgtcaacttgaagtagttgaaaagatcagattccagttttgaagcatttattcaagtagtaagctgagaatggcctatttgggaaaacacagactccagagaaatggctcagtgctctgaagtcagatgttaaattcttccctatataggcaaaaggcaaagaaattgaacaggattacattttccatagaaggctgatgtatgaggtacaacaatttaatttgttacagtttgctttttttctcctaggcctttattttcttgacagctgattttcatttccttcccaatttaaaagaatgagtttggccaggtgcagtggctcatgcctgtaatcctagcactttgggaggccatggtgggtggattgccttagctcaggagtttgagaccagcctgggcaacacgatgaagccccatctctactaaaatacaaaattagctggctgtggcgacgtgcacctgtaatcccagttacttgggatgttgtgggaaataaaggactagagagactgatacaaggaacgggagaattgttcatttaaggtacgcaccggctcagtggattcacatctaaaaagctgagcactgaacaaagactgagcgaggttttcataagcaaacttacagaagcaaaataaaagtaatcatacagtgataggtcacgtaatctatagcatagcataacttgtggccttgcatagctggtggccttgtagctgcatttaaagaaaaacaagaactgactaaatacagacttctttccttttttttttttccttcaccttcgttctggaggggggatgtctggaacctattcttttggctttgacttctcaaacagcattataactgtctttgaagtgagcttgctaggcagaggaaaacttgttcttttctttttaacctttgccttgcctgttacttttcttggagtgaatgaatgcatatttattttttaaatttctggcttagggaggctaaggtaggagaattgcttgaacccaggaggttgcagtgagccgagatcgtgttattgcactccagcctgggtaacagagcaagagttggtctcaaaaaaaaaaaaaaaaaagagtgagttgaacattccagcttaagacagtgtgatagccatgaagtctttgtgtgagaaagggtaagatgaaagttcatctacaatggagatcaagagtgaagagggaaggggtcttccctggctcccttcaacatttacatgtcaacattgacataattttatgaaacaatatgggtaagaatgaagacaaaaaggcaaatccacagtctgggaaaggaaagttccagctgcctgtcatgtgactcaatgccaccttaatcacattgctttaaggctcaagataatttagagatggaacagctcacatttttggctttagtttcacagactgtacaggtagaaaatgttctggttatgtaatcaggttaattgggggattttggttggttaagcctaaatttcatttccctataaattattattttatcagaattgtatttgagttgtatttcagggtccttaggtaggtcctagggcactacacacagttcagtcttactgtttctcatttatttatttatttattgtttttttgagacagggttttgctcactgcaacatctgcctcctgggctctgggtgcgagcagtcctcccacctcagcctcctgagtagccaggactgcaggcatgcaccatcacacctgacttaattgttgtattttttgtagatgccaggttgtccagtctagtctcaaaatcctgagctcaagtgatccatcagcctctgtgtctcacccaaagtgctgggattacaggcgtgagccacagtgcatcgcctcatttaatttttttttttttttttttttttttttttttgagactgagcctagctctgttgcccaggctggagtacagtggtgtgatctcggctcactgcaacctccgcctcccgagttcaagtgattcttcggcctcagcctctctagtagctgggattacaggcacacaccaccacgccccactagtttttgtatttttaatagagactgggtttcaccatgttggccaggctggtcaagaactcctgacctcaagtgatccaaccacctcggcctcccaaagtgctgggattacaggcgtgagacaccgcgcccggcctatttaaattttttagcactcgccttggggactggtttcccccacattttccaaatagattggatgcagtgtctgctattctccaccctgtgtccgaggctaactcttcaagggcttgcagtagaaatcctaaatgttcagtttctctcccgcgtttccaacatcaactccattctccagttcacaatattatcaactatttcttctttatagtacaacattgtatttattcatcccgtttaaaacagatgcagtgtattttaattgtttattattttatcacagagcaatagatgattctttttaaagtatttgtttgctatttctgaaaatttcacatgagaagaaggcagagaaaaatcaccacacatctcagtgaacaaaacctttgtgcctctccttttatttttcctaggcacagacatcaggatgtctttgggttgaggttcctttttggaaactttacagaatgatctgtcttccgttccccctccaatttttcctggtcctgggtttcagaactgcctaggctgagccaagatacccaccactgccatgtctcttggagggcctagtacatatcagcccctgagtcatacctcccagagcacagcctgaagtagaggagtggggcctcccaagggagtagctgaatgccttgtggtgggaggagactcctggtataatcttcatctagataaccaatccccttggggtgctcagcttttctccctcaaccccagtttccattatttggagatacatggctggtcagccaattggattttgctcctgagaggaaagagaaatgattcctgtcctctggattgtctcagaaatgtaaagaaagaaaacttttttttttttttgcctttcccatgcatactgagggagaaaactcaaaacgtgtgggagaaaacaaaacaaacagaaaaagttggtgcaaaagtaattgaaaagtaattgtgctttttgcattgttgaaatttgctgtttgatattggaatacattcttttttttttttttttttttttttttttttttttttttttttttgagacagagtctcgctctgtcgcccaggctggagtgcagtggtgcaatcttggctgactgcaagctccgcctctcgggttcacaccattctcctgcctcagcctcccgagtagctgggactacaggcgcccaacaccacgcctggctaatttttttgtatttttagtagagatggggtttcactgtgttagccaggatggtcttgatctcctgaccttgtgatccgctgcgtcggcttcccaaagtgctgggattacaggcgtgagccactgcacctagccttcttcttttttttgacagagtcttgctctgttgcccaggggcatgatctctgctcactgcaacctctgcctcccaggttcaagtgattatcatgcttcagcctcctgagtagctgggattacaggcatgcaccatcattgccagctaatttttgtatttttagtagatttggggtttcaccatgttggccaggctggtctccaacacctgacctcaagtgattctcccaccttggcctcccaaagtgctgggattacaagtgtgagccactacacctggcgccaaaaatcttaatgatcttggacttaggaaaaagattctatgacatgacaccaggagccctaggatcagagaacaagtatgtcatttagactacatcagaatttaaaacttttgtgcatctggccaggaatggtggctcacacctgtaatcccagcactttgggatgcataggtgggtggatcatgaggtcaggagttcaagaccagcctggccaacacggtgaaacaccgtctctactacaaatagaaaaattagctgagcgtggtgtcacgcgcctgtaatcccagctactcaggagactgaggcaggagaatcgcttgaacccaggaggtggaggttgtagtgagccaagatcacgccactgcactccagccgcggcaacggagcaagactccgtctaaaaacaaaaacaaaaaacttttgtgcttcaaaaaacaccatcaagaaattgaagcctgtgtggccatgccaccctaaacgcatctgtttggcatagctaagcgggattgggcctggttagtaaatggatggagaatgcctgggaatactgggtgctatatgctttgaaaaaaagaagaagaagagggtggggaatttgacaagagaattccccaaatgagagaaaaccttccatattgaaaatctggtcattccccttcatgacatagggtagaggctgtattggtagccagcactctgaggcatcgtggcccattactgcaggaaatgaactctaccccgcagttctctctggcagtggtgtgcccacagtcccccagtctctcccagtttatggggtgacaacaaagtggtcatccggagagaaatctgaccttgtgtttggatttgtgagtacagacactcttcaggacaccctccttcctccccaaagaaaggaagctttttatcaccaaccattccagtcataggaagcagggtctgaagtctaagtccttattccatgcaaagggagattgcactgaaaacttgttaaaaatgtcaaggaaggcttcattcaacacaattgcaatatgtgtcaggagaactgtaatatgggaaagagattgaactcaatctggaatgcatcaagagaattatagctaaagagtagggtgagggagaggatggaatttggttaggtgtcaagagttgggagactgattaattatcatagatgggggaaatggaacttgattagataccaagtttgagggcattctaagctctaagtctggtcaagaagagggttctgaggagcctgactcaactttggtcaaggaaggagtccttgagattcccccagcctagttcttgctagggctgatgataaatccttaaatttctggtttcctccccacgttccagaacacccatttcttctctctagtggacattatcaactatgtgtccccagtgatacatttgaaactgctgcaatattgtttattttttgacagagcaataagtggctctgtgtaagtttgagacagtctccctctgtcgcccaggctggagtgcagtggtgcaatcttggctcactgcaacctccacctcctgggttcaagctggtatcctgcctcagcctcctgagtagctggattacctatgtatgccaccacactgggctaattttttgtatttttagtagagacagggtttcaccatgctggccaggctggtcttgaactcatgacttcaagtgatccacccgcctcagcctcccaaagtgctggaatttacaggtgtgagccaccgcacctgacctctgtgtaaatttttaaattttgtttataaatatttttcatgagtggaaaacactcaataaccactcaactacattgtgtaaatccttgtgcctaatgactcctgatgtcgaccatctttcgcgtgcttactagccatttgtatgtatcttgcagaagtgttattcagatactttcccatcttttaaggaatcagtatttttttttttttttttttttttttttttttttttttttggtgagacagagatttactcttgttgcccaggctggagtgcaatggcgcgatctcggctcaccgcatcctccgcctcacaggttcaagcgattctcctgcctcagcctcctgaatagctgggattacaggcatgtgtcaccacgtccggctaattttgtatttttagtagagacggggtttcaccgtgttgcccaggctgatctcgaactcctgacctcaggtaatccacccgcctccgcctcccaaagtgctgggattacaggcatgagccactgcgcccggccaggaattagttttttacttggtacaataattcattatagttaagtattgtaagaaatcttaaaatgtaccagctgaaggaattttacatgtacagttaagatagtttgacaaatctacttctctaagatgaataatactgtatttttatttttgtgactggctttttgcgattagtataccattgcttataccatggaacaggatgttattttctaaggctaaataatattccattgtatgtatatgcttaccacattttggttatccgttcagccatcaatggacattgatggattgatccacctcttggctattgtgaatcatggttttcaaatatctcttcaagatccagttttcaatttatttgaattgaataaaaatagacctggaaggccgggcgcaatggctcatgcctgtaatcccagcactttgggaggccgaggcgggcggatcatgagatcaggagatcgagaccatcctggctaacatggtgaaaccctgtctctactaaaaatacaaaaaattagccaggggtggtggcgggtgcctgtagtcccagccacttgggaggctgaggcaggagaatcgcttgaacccgggaggcggagcttgcagtgagtcacagtgagccaagatcgcaccattgcactccagcctgggcgacagaacgagactccgtctcaaaaaaaaggacctggaaatgggttgctggaggataacattttttaaattagcttttgagtaccaccatactgttttccatagaggttgaaccattttacattcctttggacagaacacatgagttccagtttttcaacattctttccaaaactttatatttggggtgtttgaatttttttctttgtagttgagtgtaggagttgattatattttctgaatattaagaccttgccagatgcatgacttgcttatatttgctccaatgtcatggtgataccgacgtgttgggaagggaagagcgtggtccctttaaataatacagaagtgggtaagggaagtgctgggtagaggagggtgtgatccctggctagggctccacccccacagacctaggtgaggacagttatttcctgcccaaatgttgcatttcccaagaccaccctggcccaccatgccccattctgggcctataaaaaccccagaccctagtgggcagacacacaagcagctggttgtcaagaggagcacgccagcagaagagcacactgataggcactggcacaccagcaggccatcagctggcggatgaggcagtccatcaactggcggggctggtgggacaaggcagagtttggctgagccagggccgttgagcagcccagctcccaggaagaccatctcgcttctggctcccctatcacttccactcaataaaactattcactcattctccaagcccacgtgtgatctgattcttctggtacactaaggcaagaacccgggatacagaaagccctctgtccttgcgacaaggtagagggtctcattgagctcattaacacaagctgcctataggcaaactaaaagaccacctgtaacacacgccccccactggggcttcaggagctgtaaacattcaccccttgacactgctgtggggctccactgctgtggggtcggagccccacagcctgcccatctgtatgctcccctagaggtttgagcaacggggcactgtagaagcaagtcacaccccattgcacacctgctaggggaacaagggaaactttcccttttcggtagggtgccttttccctctgtttgtagtgtcgtctcatgggcaaaagttttaaattttgataaacatttgctttttgttaagactgagctccctggaggttttacctctgaaccttgtccccattcagccttcagcagttcatcaattacaatttaagtttttctaccacaatactgtttctcacaaaggtttctgctcttcagtttttgatttagttagttatgactcatcaattaggttggttgagtcccttgcaaaaatcgagttgtggttttttttgttttttctttctgctaattgagtcagaacaaattctccctttcaggtatcctcaatggttaaactttgtgaacaggcattttcaaggaaacacactctcaggactgctaatgttaacatttttctgcatatgaattcagaggactttgttatgacaggcgctgtagacacacactacagacagacattagggacagcccaggcagcgtgcttttctttctggattcactgaaaagacatttcctgttctgctgttggtattgcttagttcagttttagcatcagaatcgctttatggaagaaagtgggtatacaccaagtgataaccaagtcatggaataaatgtctggagtccacagcatcatgggaacttcttaggaatagagtctaggcccccagtgctgtcagtctcacccatcctcctttacatgtgtgagatgttttaggactcagtggtctttgaggatgtagatgtgagcttcacccaggaggagtgggctttgctggatccttcccagaagaatctctacagagatgtgatgcaggaaaccttcgggaacctgtcctctataggtgagggtgacaatattacttccttccttcagcgaattagaaaacatggttttttttgttttttttttttgagacggagtcttgctctgtcgcccaggctggagtgcagtggcgcaatctcggctcactgcaagctccgcctcctgagttcatgtcattctcctgccttagcctcccgagtagcggggactacaggcgcccgccaccgtgcctggctaatttttgtatttttagtagagacagggtttcattgtgttagccaggatggtctcgatctcctgacctcgtgatccgcccccctcggcctcccaaagtgctgggattacaggcgtgagccatcgcacccggccgagaacgtgtttttagctcattaatgctgttccacgatttggaaatatggacagggaatatgtcagtgaataaatgaggcacggatgcagtgtaccatgaacatagaatattatttttattatagctttatactaattaagactattttcctggttctgtattttaggaaataaatggaaagaccagaatattgaagatcactacagaaatctaaggtaatttacacttacaaaatgaagcaatgtctttctagaaaatcttagaatgtgagactatgtttaaaaaaaaaaaaaaaggctgggcgcggtggctcacagcgcattttgggaggctgaggcaggcggatcacaaggtcaggagatcgagaccatcctaacacggtgaaaccccgtctctactaaaaattagcagggcatggtggcacgtgcctgtagtctcagctactcgggaggctgaggcaggagaattgcctgaacctgggagcagaggttgcagtgagccgagatctcgccatcgcactccagcccgggcgacagagtgagactctgtctcacaaaaaaaataagaaaagcaaatgaaggaaataagcccagcatcaaatttgtttatttattagaataataattattttttctttctgagacagagtttcactgttgcccaggctggagtgcagtggcatgatctcggctcactgcaacctctgcttcccagattaaagcaattcttgtgcctcagcctcctgagtggctgggattacaggagggcgctaccacccctggctaatttttgtatttttagtagagacagggtttcatcaccttggccaggctggtcttaaactcctggcctgaagtgatctgcctacctcggcctcccaaagtgctgggattacaggcattagccgccgcgcctggccactttttctttttctttttcttttttttttttttttttgagatggagtcttgctctgtcgctcaggctggagtgcgatggcccaatctcgatctcctgaccctgttgatctgcctgccttggcctcccaaagtgccggattacaggcgtgagccatcgcgcctggctgccacatttatttattcttaacacattttatctaaaatcctatatttcagtgtgacataaactgggcacagtgggtcacacctgtaatccaactatttggaggtagaggtggaaggattgctagaggcctggagtttgagaacagcctgggcaaaacagcaagacttcataacaacaaagaagtagctagacgctgtggcatgtacctgtagttctagctgctcaggaggctgagtcagaatcacttcagcccaggagtttgaggctgctgtaaaccacagtgatgccactacactccagcctgggcaacaggatgacccccattcaagaaaaatgatagaggtttagtatttgtaaagtactctatgggaaaatagtattaagaatttccaggccaggcacagtggctcatgcatgtaatcccagcactttgggaggccaaggtgagtggatcacgaggtcaggagttcgagaccagcctggccagtatggtgaaaccccgtctctactaaaaatgtaaaaattagccgggcatggtggtactcagctgtagtcccagctacttgggaggctgaggcacagcctcaatcttgaacccgggaggcggaggttgcagtgagccgtgcgtgccactgcactccagcctggtcaacagagcgagactttgtattaaaaaaaaaaaaaaaatttctatatagggtcaggcatggtggctcacacctgtaatcccagcactttgggaagcagaggcagttggatcacttgaacctgggaggcgttctggaggtcaggagttcgagaccagcttggccaacatggtgaaaccctgtgtctgctaaaaatacaaaaattagccgggcctcatggcacatgcctgtaatcccagctactctggaggctgaagcaggagaatcgcttgaacctgggaggcggaggttgcagtgagccgagatcacgccactgcttcttgctttaaaagaagagtaaagacaagagtgttggaccagtattgcagttctgtagtatcatttcttataaaaaacaaaacaacaataatttatcaaaattggcatataaagactgacaacattctaataaaggcacaaatttctttttaatacttgtttcaggctctttattctctttataagttaactaatctattttcttcaaacttctgcattagttctttaaaatcacaacacttagcaagctgacttttttaatgtgctcaatacaaatacttgtgaacttttaatatgttgagtgctttcattgtgataactggatctccatttgatattttcatttatataactcatttgcagtctgaaaatttttagtgccagtccctgaatatatcattgaaagttaattttctttgcattttaaaatatctggattatgaagaaaaagtgatgaaaataaattaaaactgaattaccttaaaaaaaaacaaaaaaaaaagaccaagcgtggtggctcatgcttgtaatcccagcactttgggagactgaggcgggcagatcacctgaggtcaggagttccagaccagcctgacccacatggtgaaatcccatctctactaaaaatacaaaagtagccaggcgtggtagcgtgcacctgtaatcccagctacttgggaggctgaggcaggagaattgcttgaccctgggaagtggaggttccagtgagccaagatcatgccactgcgctgtagcctgggcaatgagagtgaaactctgtctcaaaaaaaaaaaaaaaaaaaaaaaaaaaaaagaatgtcactttctgacaggcccaggagcctcaagttatcttgggaccttgacaggaggaaaattcactcaactcatacaggtatttgcaggcatagataagtctgtggctgggcttcaaggctttaaaaagtacaatctgagattccttagtgaacaaagtttcagcaaagccaatttttaaaaagagtttagtctcagaactaggaaattggctaaaaagatatgggacaagatatttaaatttgcctttttctgtctatcccaatctaacaacctctgacccaaatctcttgctgctaatgaccccatgtctgattggttttcagagctgctttttttttttttttttttttatactttaagttttagggtacatgtgcacattgtgcaggttagttacatacatatacatgtgccatgctggtgtgctgcacccactaactcgtcatctagcattaggtatatcccccagtgctatccctcccccctccccccaccccacaacagtccccagagtgtgatgttccccttcctgtgtccatgtgttctcattgttcagttcccacctatgagtgagaatatgcggtgtttggttttttgttcttgtgatagtttactgagaatgatggtttccaatttcatccatgtccctacaaaggacatgaactcatcatttttttatggctgcatagtattccatggtgtatatgtgccacattttcttaatccagtctatcattggtggacatttgggttggttccaagtctttgctattgtgaataatgctgcaataaacatgcatgtgtctttatagcagcatgatttatagtcctttgggtatatacccagtaatgggatggctgggtcaaatggtatttctagttctagatccctgaggaatcgccacactgacttccacaatggttgaactagtttacagtcccaccaacagtgtaaaagtgttcctatttctccacatcctctccagcacctgttgtttcctgactttttaatgattgccattctaactggcgtgagatggtatctcattgtggttttgatttgcatttctctgatggccagtgatggtgagcattttttcatgtgttttttggctgcataaatgtcttcttttgagaagtgtctgttcatgtcctttgcccactttttgatggggttgtttgtttttttcttgtaaatttgtttgagttcattgtagattctggatattagccctttgtcagatgcataggttgcgaaaattttctcccattttgtaggttgcctgttcactctgatggtagtttcttttgctgtgcagaagctcttcagtttaattagatcccatttgtcaattttggcttttgttgccattgcttttggtgttttagacatgaagtccttgcccatgcctatgtcctgaatggtaatgcctaggttttcttctagggtttttatggttttagggcaaacgtttaagtctttaatccatcttgaattgatttttgtataaggtgtaaggaagggatccagtttcagctttctacatatggctagccagttttcccagcaccatttattaaatagggaatcctttccccattgcttgtttttctcaggtttgtcaaagatcagatagttgtagatatgtggcattatttctgagggctctgttctgttccattgatctatatctctgttttggtaactgtagccttgtagtatagtttgaagtcaggtagtgtgatgcctccagctttgttcttttggctcaggattgacttggcggtgcgggctctttttcggttccatatgaactttaaagtagttttttccaattctgtgaagaaaggcattggtagcttgatggggatcgcattgaatctgtaaattaccttgggcagtatggccattttcacgatattgattcttcctacccatgtgcatgtaatgctcttccatttgtttgtatcctcttttatttccttgagcagcggtttgtagttctccttgaagaggtccttcacatcccttgtaagttggattcctaggtattttattctctttgaagcaattgtgaatgggagttcactcatgatttggctctctgtttgtctgttgttggtgtataggaatgcttgtgatttttgcacattgattttgtatcctgagactttgctgaagttgcttatcagcttaaggagattttgggctgagatgatagggttttctaaatatacaatcatgtcatctgcaaacagggacaatttgacttcctcttttcctacttgaataccctttagttctttgtccttcctgattgccctggccagaacttccaacactatgttgaataggagtggtgagagagggcatccctgtcttgtgccagttttcaaagggaatgcttccagtttttgcccattcagtatgatattggctgtgggtttgtcatagatagctcttattattttgaaatatgtcccatcaatacctaatttattgagagtttttagcatgaaaggttgttgaattttgtcaaaggccttttctgcatctattgagataatcatgtggtttttgtctttggctctgtttatatgctggattacatttattgatttgcatatattgaaccagccttgcatcccagggatgaagcccacttgatcatggtggataagctttttgatgtgctgctggattcggtttgccagtattttattgaggatttttgcatcaatgttcatcaaggatattggtctaaaattctcttttttggttgtgtctctgcccagctttggtatcagaatgatgctggcctcataaaatgagttagggaggattccctctttttctattgattggaatagtttcagaaggaatggtaccagttcctccttgtacctctggtagagttcggctgtgaatccatctggtcctggactctttttggttggtaagctattgattattgccacaatttcagagcctgttattggtctattcagagattcaacttcttcctggtttagtcttgggagagtgtatgtgtcaaggaatttatccatttcttctagattttctagtttatttgcgtagaggtgtttgtagtattctctgatggtagtttgtatttctgtgggatcggtggtgatatcccctttatcattttttattgcgtctatttgattcttctctctttttttctttattagtcttgctagcggtctatcaattttgttgatcctttcaaaaaaccagctcctggattcattaattttttgaagggttttttgtgtctctatttctttaagttctgctctgattttagttatttcttgccttctgctagcttttgaatgtgtttgctcttgcttttctagttcttttaattgtgatgttagggtgtcaattttacatctttcctgctttctcttgtgggcatttagtgctataaatttccctctacacactgctttgaatgcgtcccagagattctggtatgttgtgtctttgttcttgttggtttcaaagaacatctttatttctgccttcatttcgttatatacccagtagtcattcaggagcaggttgttcagtttccatgtagttgagcagttttgagtgagattcttaatcctgagttctagtttgattgcactgtggtctgagagatagtttgttataatttctgttcttttacatttgctgaggagagctttacttccaagtatgtggtcaattttggaataggtatggtgtggtgctgaaaaaaatgtatattctgttgatttggggtggtgagttctgtagatgtctattaggtctgcttggtgcagagctgagttcaattcctgggtatccttgttgactttctgtctcattgatctgtctaatgttgacagtggggtgttaaagtctcccattattaatgtgtgggagtctaagtctctttgtaggtcactcaggacttgcttaatgaatctgggtgctcctgtattgggtgcatatatatttaggatagttagctcttcttgttgaattgatccctttaccattatgtaatggccttctttgtctcttttgatctttgttggtttaaagtctgttttatcagagactaggattgcaacccctgcttttttttttttccattttcttggtagatcttcctccatccttttattttgagcctatgtgtgtctctgcacatgagatgggtttcctgaatacagcacactgatgggtcttgactctttatccaatttgccagtctgtgtcttttaattggagcatttagtccatttacatttaaagttaatagtgttatgtgcgaatttgatcctgtcattatgatgttagctggttattttgctcgttagttgatgcagtttcttcctagtctcgatggtctttacattttggcatgattttgcagcggctggtaccggttgttcctttccatgtttagtgcttccttcaggagctcttttacagcaggcctggtggtgacaaaatctctcagcatttgcttgtctgtaaagtattttatttctccttcacttatgaagcttagtttggctggatatgaaattctgggttgaaaattcttttctttaagaatgttgaatattggcccccactctcttctggcttgtagggtttctgccgagagatctgctgttagtctgatgggcttccctttgaggttaacccgacctttctctctggctgcccttgacattttttccttcatttcagctttggtgaatctgacaattatgtgtcttggagttgctcttctcgaggagtatctttgtggctttctctgtatttcctgaatctgaacgttggcctgccttgctagattggggaaattctcctggataatatcctgcagagtgttttccaacttggttccattctccccatcactttcaggtacaccaatcagacgtagatttggtcttttcacatagtcccatatttcttggaggctttgctcgtttctttttattcttttttctctaaactttccttctcggttcatttcattcatttcatcttccattgctgataccctttcttccagttgatcgcatcggctcctgaggcttctgcattcttcacgtagttctcgagccttggttttcagctccatcagctcctttaagcacttctctgtattggttattctagttatacattattctaaatttttttcaaagttttcaacttctttgcctttggtttgaatgtcctcccgtagctcagagtaatttgatcgtctgaagctttcttctctcagctcgtcaaagtcattctccgtccagctttgttccgttgctggtgaggagctgcgttcctttggaggaggagaggcgctctgatttttagagtttccagtttttctgttctgttttttccccatctttgtggttttatctacttttggtctttgatgctggtgatgtacagatgggtttttggtgtggatgtcctttttgtttgttagttttccttctaacagacaggaccctcagctgcaggtctggtggagtaccctgcagtgtgaggtgtcagtgtgcccctgctggagggtgcctcccagttaggctgctcgggggtcaggggtcagggacccacttgagggggcagtctgcctgttctcagatctccagctgcgtactgggagaaccactgctctcttcaaagctgtcagacagggacatttaagtctgcagaggttattgctgtctttttgtttgtctgtgccctgcccccagaggtggagcctacagaggcaggcaggcctccttgagctgtggtgggctccacccagttcgagcttcccggctgctttgtttacctaagcaagcctgggcaatggtgggcgcccctcccccagccttgctgccgccttgcagtttgatctcagactgctgtgctagcaatcagcgagactccatcgggtaggaccctccgagccaggtgcgggatataatctcgtggtgcgccattttttaagcctgtcggaaaagcgcagtattccggtgggagtgacccgattttccaggtgccgtccgtcacccctttctttgattaggaaagggaactccctgaccccttgcgcttcctgagtgaggcaatgcctcgccctgcttcggctcgtgcacggtgcacacacccactgacctgcgcccactgtctggcacttcctagtgagatgaacccggtacctcagatggaaatgcagaaatcacccgtcttctgcgtcgctcacgctgggagctgtagaccagagctgttcctattcggccgtcttggctcctcctcctttttttttaagattgagttttgctcttgttgcccagactggactggagtacagtggcggggtctcagctcactgcaacctctgcctcctgggttcaagtgattctcctgcctcagcttcctgagtagctccaattacaggcacccgccaccacacccagataatattttgtatttttagtagagatggggttttattatgttggctaggctggtctcgaactcctgacctcaggtgatccacccaccttggtctcccaaagtgctgggattacaggcgtgagccaccatgcctggccggttctcagggctttttacctgtatccctcagagcttaagatcaattctacaaaggcttctgaagctaagactttcactctttatcctgggactcattatttaccttatagttcactgttctgtgctaaaactatagtatgctgtttgcataaatattaatactgtactaaaactatagatgagaatactaatgcctttgtcatgcaagccttcgaaccccaacccagcctatgtgagcatgctcagatggctgcaaagtggttccactcacactttggggtaagcacctacccccactacatcccctgtcagcaggaagaagttaaagtggtcttcatcctttttccatccttatagcccacaccttaagaataaggtgttatgaaacccaaagggagagattgaaactacctttacaaaaattataaatgagacagttagtacagtgaaaagagatctgacgtgactccaccttactttttttttttttttttgagacagagtcttactctgtcgccagggctggagtgcagtggtatgatctcagctcactgcaacctctgcctcccaagttcaagagattctcctgcctcagcctcccaagtagctgagaatacaggcacccgccactaagcccagctgattttttgtatttttagtagaggcggggtttcaccatgttggccaggctggtctcgaactcctgacctcgtgatttgcccacctcagcctcccaaagtgctgggattacaggcgtgagccaccacacccggccggctccatcttgcttctaacctccaagctgtccttgttcattcctgggcataggccaaactaaccttgggagggaatttagcttatagtttaactctgaaacgaaattgaagatagcccttccccctccgccccccaaaaaattttgctcttggactgttggcatatttctgaatgctttcaggtcccagtgtaatcccagcactttgcgaggcctagccagaaagatcacgttagctcaggagttccaaaccagtttaggcaacatagggagtcctcatctctacaaaaaaaaaaataataaaattagccaggagtggtggtgaatacctgtagtctcagctactggggaggttgaagtgagaggatcgcttgagcccaggagttggaggctacagtgagccatgatggcatcactgtactccagcctgggcaacagagtgagatctttcccaaacacacaacaaacaaagcataacagttttttatttttttgagacacagtttcactctttttgcccaggctggaatgcagtggcgtgatcttggctcactgcaaccttcacctcctgggttcaagtgattctcctacctcagccgccctagtagctgggattacacgtgcacgccaccacacctggctaatttggtatttttagtagagatggggtttcaccatgttggccaggctggtctcaaacttctgacctcaggtgatccacctgcctcagcctccccacgcactgggattacaggcatgatccaccgtgccttcggggaggccaggatttgaacctttatcttcctggtccttcttgcctagggctcagcagtaaaagcctttctttctagcccatcaaacctcagtgtaaatatctagttttcctgggcaacatgagtggacctcagttctgttctacttttttttttttttttttttttgagcaagacactcagtcacccaggctggagtgaaatgacacaatcacagctcactgcaacctccacctcctgggttcaaggaattcttgtgcctcatcctcctgagtagctgaggctacaggtgtctgccactatgcccagctaattttttttttgtatttttaatagagatggggtttcatcatgttgcccaggctgcctcctgagctcaggcaatccacccaggttggcctctcagtgtgctaagattataggcatgagccaccgcacctgacccacatttctttataatagtgaatttctttataattgtgaattccagtatgctttggcgaaaagggttttttttttttgttttttttttttgagaaggagtcttgctctgtcgcccgggctggagtgcagttgcgtgatcttggctcactacaagctccacctcccaggttcacgcaattctgctgcctcagcctcccaaatagctgggactacaggtgcctgccatcatgcccggctaatttttttgtatttttttttagtagagatggggtttcatcatgttagccagcatggtcttgatctcctgacctcgtgatccacccatctcggcctcccaaagtgttgggattacaggtgtgagccaccgtgcccaccccggtaaagggtcttaaaatgtatcttcccttgctgcagaagctattttgaagtgccatatttttcattaagcattaagtagagaacatcaggataaattagtaggatcatcagtattacatgaaacattagattgctgaatgaattgcataatttaactagaaacactttattctcaagtagaaaagttgtttgctttggagaatttaatcatctgttacttgttcataaatattcccccgaagggctctgacctctccctccagtgtgagcctaattcctaaaactgaataattatttgctgctgcctgtttcacaaacacacatggatgggtcagatgtgtctccttttcctcaaccttatatgaaggaaggagcatctgagcacagcacagaaatgatccaaaccaagctactgtgaagtgtaaagagagcagcatggcttttccaaacaggacagcatcacaaaccctcccaagggtacaaggagagcagttagaacagaaggaaaggtgacccgcagactgttaggactggtgaaaatgattcattgaaaatctaagaaagaactcttgtctttggagccctgtgcccatttctctggagtgtgtcttttcctgaatggccattcccagcttttcacttgaataaactcttcacaactcagtcctacgtttttgcatgatgtgaggttgacgggacacacacccaatacccatggactctatgctccctgccaccaccttcctcttccctcctggcctgcacaaatgtccaggatccaacccttcactctgaatcccccaaactccctgactggacccagtcatgctggatccctcagcagacccatacaacttagaaactctcccctgtcccccaaacctggcttgactctcgtgccctcctcaggcacctttaccctcagcttgaactggcctcagccatgatttgaacttcaccctgtgctccttcatgctccacacctacctccctcaggtgccattgcccccagcagtcctggacctaaggacatcaccatgtctccggcattgcatcctgggagccctcaccttttcccacctctccctggcctttaaagtcattgctgctgtgagacccagaccaccattttgttccagtagccccctgcccacccattctccctctgtgacttctctgcgctgcccagcagatgccattgtatcccagccacggatttctcaactgccattaccaccaactggaagtctttttatttatttatttaatttttataacagagtctcactatgttgcccaggctggtcttgaactcctgggcttaagcagtccccccacctcagcctcctaaagcctggggttatggggtgtctatgcagtgagcccttccatgcacttgaagttgtgaagaacatctaaagactttaccacattggttacatttatagggtttctctccagtgtgagtccttccatgccttcgaaggtttgagggacatccaaaagctttcccacattgcttacatttatacggtttctctccagtgtgagtccttccatgcatttgaagtcgcgaggcacatccaaaagacttcccacactgcttacattcatagggtttctctccagtgtgagtccttccatgcatttgaaggtgtgaggcagatccaaaggctttcccacactgcttacattcataaggtttctctccagtgtgagtccttccatgaatttgaagctgtgaggcagatctgaaggcttttccacattgcttgcattcatagggtttctctccagtgtgagtccttccatgatatcgaaaggagctcgaacagttgaaggatctgccacactgcttgcattcataggtttttcctccagtgtgagtcctttcatgtctatgaaataaactgggcaaactgaatgttttcccataacccttacattcatacggcttctcttctctgtgcatcctttcatgtatttgaaagaaagagaaattactaaatggttttccacattccttacatgcatagggtttctctcccgtgtgagtcctaccatgtgtttgaaggagtgaggcagatctgaaggctttcccacattgcttacactcgtaaggtttctctccagtgtgagttctttcatgatatcggaaggaactggaagaattaaaggctttaccacattggttgcatttatagggtttctctccagtgtgagttttttcatgtgtttgaagtgaactgggagaataaaaggctttcccacatatcttacatttatgagatatctctccagtgtgcattcccaagtggttttgaaagctggtaagataagataatactttcccacaatgtttacattcatagggttttttcctagagtgggttctttcatgtctgcgaacagaactgggacacttgaatgcttttccacattccttacattcatatggcttctcccccgtgtgagttctttcatgtatttgaaaggaatgggaagagctgaaggctttcccacactgtttacattcatatggcttctccccagtgtgagttcttttatgagcatgaaggcatgtggaactatggaatgctttcccacattcattacatttataaggcttctccccagtgtgagttctttcatgtattcgaaggctactagaatgactaaaggctttaccacactgtttacattgatatggtttctctccagtgtgagttcgtttgtggataagatacaaactgagaaacatcaaggctttcccacaaaatttacacttataaggtccatctccacggtgcattatcctgtgtctttgaaggtttgaatgggaaataaatgtttttccgcattcctcacaaacatagagtttccttccactatgagccctttcatgtgtctgaacagaggagagacagttgaaaggttttttacagtatttacatttatatggtttctgtccatattcttgatactcatatgccttgtgtccagtgtcatctctgatgtgcctattaagagatgaatgagcactgcctacttctccatacacactgctttcgcatgattttactccagtagttgttttcttcagcatgtcatctggaacctgggtcaaaatttctccatgctgatgaccttctttactttcaaagagtctctctcccacaattctgtgaacaataagaagtacattataatgggtttgattatcagtgattttatattcattcacaagtattgcacttgcattttttctcttttttttgagatggagtctcactctcttgcccaggctggagtgtagtggtgcgatcttcgcttactgcaacttccacctcctgagttcaagcaattttcctgcctcagcctcataagtagctgggactacaggtgcataccaccacacccagctaattttttgtattttagtagacggggtttcaccatgttggccagactggtcttgaactcctgacctcaggtgatccacctgcctcggcttcccaaaatgctgggattacaggcatgagccactgtgcctggcctgcacttccatttttaacatcatccagcaaactgtaggctttctgccctgtctgaattgtttgaatatgaacggaccacaggctctacaagatggcccagccatatctattatcaaaaaagatgatagaaggcttctgaatactgttttttggttttttttgttttgttttgtttttttgagatggagactcactctgttgcccaggctggaatgcagtggggcaaacttggctcactgcaacctccccctcctgggttcaagcgattctcctgcctcagcctcccaggtagctgggataacaggtgtccaccacgatgcctggctaatttttatatttttagtagagatggggtttcactatgttggccaggctgcttttgaactcctgacctcaagtgacccaccctcctcggccttccaaagtgctgggattacaggcgtgagccaccacgcctggcgtctctgagtactattttaaagtaaactattttacaaatactaaatatctgtctttttaaatttgttttttgggtcagggtctcacactcttgcccaggctggagtgcagtgatgccatcatgacttagtatggccccaacctcctgggctcaagtgatcctccagcctgaacctcccaaagggctgaaatatagtcctgggccattgtgtcaagcctacatcacacttcaatatgtgtttagagaaaattttctaagaataaatagattgaaattgtgcttatttcttttgtttcctttttttttttttaacattttctcccattctaagattttctagagacacacgtctttgtcatgtgagtgcaagttaccttaggtttctccttagattttcgtactctacatatatgttctggggtttccattttttccctacaacacacaacaaggaaaataatcttgaattagtataaaattattaaaaaattacatgattctatgttcatggtacactgcaagcatgcttcctttatttatcaaatattccctgtccacattgtaaatcactcaacagcatacatgagctaaaaatacttgttctcagaaaaaaaaaaaaacttgttgtctcatttactgaaggaagtaatgttgtcacccttacctatagaggccaggttcctgaaggtttcttgcatcacatctctacagagatttttctgggaaggatccagcaaagcccactcctcttgggtgaaggtcacagccacatcctcaaaggccactgaatcctgaaacatctcacatgtatagaggaggatggataagactaacatcactgggaagcctatactctattcccaagaggtttccatgatgctgtggactcaaaacaattattccatgaccatcagacctcatactctctgtctacactcagtttcttccataaagtaattctgaggctacaactgaaccatgtggtaaagcaacagtagaataggaaaatgtgtatttttggtaaatccagaaaggtgtgctgcctgggctgcccctaatgtttgtttgtaaagtgggagtacggcacctgccataacaaagtcttccaaattcctgtgcagaaaaagttaacattagcagtcctgaggctgcatatccttgaaaaaaaaatgcctatcgacaaagtttaacctttgatgttatctagaaaatgaattttgttctgagtgctgcagcagaaacaaaaaccaaaaaactggattttacaaggggtcttatcaatctaaatgatgagtcataaataactaaaacaaaaactcatgagctctacactcatgagctcatgccactgcactgcagcctgggcaacagagtgagactcggtctcaaaaaaataaaattagccaggtatggtggtgcgtgcctgtaatcccagctacccaggaggctgaggcaggagaatcgcgggaatccaagaggcagaggctgcagtgagccaagatcacaccaccacactccagcctgagtgacagagcaagactccatcttaataaaaaaaaaaaaaaaaaaaaaaaaatttccaggcacctagtctcaacaaaaaggcaaacatttatcaaacttttaaaaacttttgtggccaggcatggtggctcatgcctgtaaccccaccactttggaaggctgaggcaggtggatcacctgaggccaggagttggtgaccagcctggccaacatggtgaaacaccgtctctactaaaaatacaaaaataagccaggcatggtggtatgcacctgcaattccactacttgggaggctggggcaggagaatcacttgaacccagaagttggaggttgcagtgagctgagatcatgccactgcactccagcttgggcaacagcaagactccatcacaaaaaaaccacttttgtgcatgagatgacaccatcaacaaagggaaaagggactccttgtgctctgtttaaaggataataaatggctcagcttctatggaaacagtacagtagtgcctaaaaaaataaaattactgtattttcctgtatcccacttttgggtctagttatattaaatttgaaaaaattgaaaactgaaccttgaagacatatttgaaaaccactcttcacaaaatcaaagagccagatcaatccacatgtccattgatggctgcatgcataatgaaaatatgctaggcatatatatacattgaaatattaatcttataacatcctgtctcatgctacaacaatcacaaaacttcaggatactatggtaattgcaaaaagctaggcacaaaaagaaaattacagtataattcaccttagatgagttatgtagtgttgtgcaactatacacttaaaactgcttaagctggtaaaattgaagtttattattttacaataattaaaaataataaatcacagtaccaagtaaaaaaactaattgatattgattaaaagatgggcataggccaggtatggtggctcacacctgtaatcttagcactttgggagtccgaggtgggcggatgacttgaggtcaggggttcaggaccagcctggccaaaatggtgaaaccccatctctactaaaaatacaaaaattagccgggcatgatggcacattcctgtaatcccagctactcaagaggctgaggcaggagaatcacttgaatctgggcagcagaggctgcagtgagccgagattgtgccactgcactccagccagggcaagagagcaagactctgtctcaaaaaaattttaaaaaaaaaaagcaaaagtatttgaatgacatttctgcaatacatagaaatgaccaataagtatatgaagtggtgctcaacatcaggagtcaacaggcataagtattttacacagtgtagtttcaggtggttattgagcactttctctcatgaaaagtattcataaaataataaaattttaaatatagccatttattaaagtaaaaaataataatttaaatactgcagctgtttcaagtgtatcatgagaaacacataattgaagacgtcctttcgagagaggagtgagtgttttggaatgtatcgaggaaagcagaaatttagggatttattgtcattcctaagaagagctggctgagcgcggtggctcacgcctgtaatcccagcactttgggaggcagaggtggccggatcacctggggtcaggagttcgagaccagactgattaacatggtgaaaccctgtctctactaaaaacacaaaaattagctgagtgtagtgatgcgcgctactgggaaggctgaggcaggagaatcgcttgaaccagggaggcggaggttgctgtgagccgacattgcgccattgcactccagcctgggcgacagagcgagactctgtctcaaaaacaaaaatataaaaaaaaaaaaacagcactaagctacaggggtcttaaggactcctgctttactgtttttttttttttctttttttttgagacagagtagtctcactctgccacccgggctggagagcagtagcacaatctcagctcactgcaacctctgcctccaggttcaagcaattctcctgcctcagcttcccaagtagctgggattacaggcacccaccactatacccggctaatttttttgtatttttagtagagacgggggtttcaccatgttggccaagctggtctcaaactcctgacctcgtgattcacccacctcagcctcccaaagtgctgggattacagctgtgagccactgcacctggccaggactccttctttgaccaaacttgatctcacagccctcttcttgtctaggctttggccttcttctgcagagcccagttatagcaaaaagccttttaaggcagtgcacagagaatctctcccaccaaaacttagtatttccaatcaagttcaatttccctcactcatgataatccatcaactttctcttccctaactgctgacacttcaccaagttccatcctttccctcgccttgccctgtaatataggagagagattaaactcagggagacagcctattacgtgtcgtgagaactgtaatataatatacagaactgtaatctccatattatagttctcatgacacatattacaattgtgctgaataaagccttccttgatattttaaacacattttcaatacaatctctctttataagagatagggacttagactggagactctgcttcagaaatctagaatgcataagggataataggctctctccctgtggggagacagctgagactacctcccactcacaaaaccaaaacaccaggtcagatttctctcctgaagaccactccctgctgttatcccataaacttagtaagataggggactgtgggtgcactatttcccagacagggtactagggtagagcttacctcctgcagtgatgatgcaggatgcctggcggtactggctgccaattcaaccgtcacgctgtgatagagacttaggtgttgggaacaggcccccaaatctggccataaactggctccaaaactggccataaacaaaatctctgcagcactgtgacatgttcgtgatggccatgacacccacaatgaagactgttggtttaccggaatgaaggcagggaacacctggcccacccagggtagaaaaccacttaaaggtgttcctaaaccacaaacaatagcgtaagtgatctctgccttaaggacgtgttcctgctgcagataactagccagagcccatccctttgtttcagcccatccctttgtttcccaaaaggaatacttttaatctataatctacagaaacaatgcttatcactggcttgctgtcagtaaatatgtgggtaaatttctgttcgtggctctcagctctgaaggctgtcagccccctgatttgccactccacactccatatttctctgtgtgtgtctttaattcctctagtgcccctgggttagggtctccatgaccgagatggtcttggcaagtggtgtacatgtgtgggtcttgaacccaggtcaaagtgtcaccggagtaacagttggagaatgtggaactaagctggaggacacccgagtactctaaagcaatgcccgtggtaagaaggggagcttggaagcatcagggtaacaaagggacaagtgtgggctctggttccttccatcttgtaaccttttcacactgatgaggaggaggaaggaaagtaacagaagagatgacagagcaggtttgtttgccagctaaagctaaagtggcaaaggaggaagagtccatccctacccttctgcaccccctccttattttgaagaaaaagagtggcctgacccaccagatctttcttttctggaggacactggacaaaaagtagtttccccaatgagtgttcgagcagcaccttgagcaatggctctcagttctattcaggcaggaattcaccaagctacaagagagggtgatatagaggcttggcagttccctgttaggatacaccccccagatcaacaggaaaatactatagctacatttgagccttttccttttaaatttgggaaacaccatgaggggcctgtcccgggccccattccaaaccaaggcatttccggctgaggccattccctaacccttgtacaatatctatcccccaccacagccagtagtgccacggtagatttatgctgcacaaaagctgtgagtcttctgcctggggaacccccacaaaaagttccaacaggggtctgtggacacttgccagtagggacaatcagattacttctaggtagatctagtttaaatttaaaaggagtgcaagtacatacaggagtcactgattcagattacaatgggaaattcaaattgttatagctacttctgttccctggaaagcagagccaggaaagcacaactcctgattgtgccatatgtggaaatggggaaaagtgaaattaaacgaacaggaggatttggaagcacaaataaacaaggcaaagcagcttactgggtgaatcaaagtattgataaatgtcctacctgtgaaataactattcagggaaagaaatttaaaggattggtagatacaggagcagacatttccatcatttctctacaccactggctgtccgcatggccaattcaacccactcaatttaacagagttggagttggtaaagcccctgaagtatatcaaagaatctgtattttgcattgtgaagggcccaatggacaacctgggactattcgatcaattgtaacttctgtacctataaattaatgggggagagattttactgcaacaatggggagtacaagttctaattccagagcaattatatagccctgaaagtcaacatatgatgcatgaaatggggtatgtcctaggaaaaaaattgcagggtttgaaggaactgctccaagcagaaagacaaagttcccaccaaggtttagggtatcatttttgatggtggccattgttaagcctccagaaactatacctttaaaatggttaacagataagccaatttggatagaacaatggccgctaagtaaagaaaaactggaggctttaggggacttagttactgaacaattagaaaaaggacacatagctccaacatttcccccttggaattctccagtcttcgtaattaagaaaacatcaggtaaacggagaatgttaactgacttaagagccattaattcagttatataacctatggggacattacagccaggactgccttctcctgtggattccaaaaaattggcctttaattgtcatagatttaaaagactgtttctttactatccctttagctgagcaagactgtgaacggtttgcatttacaattcctgcaataaacaacctgcagcctgctaagcattttcactggaaagtgttgccataaggcgtgttaaacagtccaacaatttgccagacttatcaattgaaaacattaaatgactttcaaaaagtactaagggatatcaactggatacaacctgctctaggcattcctacctatgctatgagtaatctgttttctatccttagaggagatcctagtctcactaggcaattaacaaaagaagctgaggcagaggtacagctgattgaaaagtaagtccataaagctcagataaatagaatagatccagagaagactctagatttgctaattttttcaactcagcattcacctactggtgttattgtccaagagcaggacttagtagaatggctttttcttccacatactaactcatggactcttaactccttatctggatcaaatcgctactatgataggaaatgggagaactcggattgttaaattacatggatatgatcctggaaaaattattgtccctctcacaaagacacaaatacagcaagcttttataaacagtcttacttggcaaacccattagctgactttgtgggtattctcgataatcattttcctaaaagaaaactatttcaatttttgaaattaactaattggattctccctaaaataactaaatttaaaccaattgaaggtactgaaaatgtcttcacagatgggtctagtaatggtaaagcttcttattccagcttgaaaggtaaagtttttcagaagccctgtacttcggctcaaaaagcaagagcttgtagctgtaagtgaggtattgactgcttttgatatgcctattaatgtgatttctgattctttgtatgtggttcattccacaccattagctgaaaatgctcagttgccatttcatacagatgaacaactgatgactttatttacccaattgcaaacagcagttagaaatagaatacaccctttttacatcactcacactagggctcatacacctcttccaggacctttaactgaagggaatcaaatggctgatggcctagttgctactacaatatctaatgccagacactttcacaatttaacccatgttaatgcctctggtctcaaatgcagatacagcattacctggaaagaagctaaagctattattcagtgatgcccaacttgccaaatggtgcattcctcatcttttataggaggagttaatcctcaaggattggaacctaattctctttggcaaatggatgtcacacatgttccctcgtttgggagactagcttatgtacatgtatgtgtggacaccttttctcagtctgactgggttacatgccaaacaggagagtcttctgcctgtgttaaacgtcaccttttgcagtgttttgcagtgatgggcattccagcttctattaaaacagataatgccccaggctatactagccaagctctagctacatttttctccatatggaatattaaacacattattggcattccatacaattctcaaggatgagccacagtggaaagaatgaatctgtccctgaaacagcagttgcaaaagcaaaaagggggaaacagggactacaggacaccccatatgcaactgaatctagaattattgactttaaattttttgagcctgcctaaaggccagatgctatcagcagctgaacaatatctacagaaaccagctgcaaagacagaagcagaacaactggtttggtggagagatctgataacaaaaagttgggaaataggtaaaataataacttggggtagaggttatgcttgtgtttccccaggatgaaatcaacagccaatctgggtgccattgagacatctaaagccttactatgagccagatacccaggaagaggttttgggaggatcccaaagactccctggttgcagccatgtcaagactgatgctgaggaggaccccaactgtcacgagcaacaactgcctggggacagatcaagaagctgtcacagatggcagagaaaaacctgagaaaagcgggacaaccagtcacaatgagtaatttaatgatagctatgacagtggtgatcaccattgccatgagtattccttcaacaagggctgacacagagaacaattacacttattgggcatatttatcaatcttggctggcaataatgcctggatgtgatcactctatgacacagttacacatgctttctggtctcagtatttaccataataatctgctcctataattgaggcatactgccctcaaaaaactatttgtaaacaggattggacctggtcagaaaaaatgaacgtacttgtttgggaagattgcattgcagaacaggcagaggtgctgcacaacgattcctatggagtcattattgattgttcccctaaggggatgtttagcttgaattgcacctctcagtctgcctgccatggccacactatgttcagctggtctgaacaaaatggtcagatggtagaaatgataagaagtatggcaagagttcctattatctggaaacatggtggtatagtggcacctcaacctcaaatgatatggcctgctgtaggagctaaacataaggatttgtggaaactattaatggctcttaataagatcaaaatttgggaaaggataaaaaagcatctagaaggacactctagaaacttggatattgcaaaattaaaagaacaaatatttaaagcatcccaggcacacctgaccttaatgccaggaactggagtgcttgaaggagctgcagatggattagcagctattaacccattaaaatagataaaaacacttggaggctctgtgatttcaatgatgattgtgcttttaatctgtgttgtctttgtatagtctgcagatgtggatcccaactcctgcgagatgtagctcaccatgataaagccacctttgcttttattgtcttgcaaaaacaaaaagggggaacatgttggggacaggctcccaaatctggccataaacaaaatctctgcagcactgtgacatgttcatgatggctatgatgcccacactgaaggttgttcatttactggaatgagggcaaggaacacctggcccacccagggcggaaaactgcttaaaggtgttcctaacccacaaacaatagtatgagcaatctgggccttaaggacatgttcctgctgcagataactagccagagcccatccctttgtttcacataaggaatatttttagttaatctataatctacagaaacaatgcatatcactggcttgctgtcaataaatgtgggtaaatctcttttcatggctttcagctctgaaggccgtcagccccgatttgccactccacattctattatttctctgagtgtgtctttaattcctctagcaccactgggttagggtctccatgaccaagctggtcttggcacttaggcttcagctgatatagatatatgtcaggaccaggtatagaatttgcatgtctttcttccatttggtgaattctcttgcaatttctgttttttaaggctatagcaaccagtattcccaggaattctacaaaccatgtactaacctggcctgaacctgcttagctgctaagatcaggtgcattcagagtggcatgaccatatactcttttatctttttttgtttttttcaattttgtttttttgagacagggtctcactctgtcacttagtctggagtgcagtggtatgatcatatttcactgtggcttcaatcacctgggctcaagtgatcctcccaccacagcctccccagtacataggactgaagtaccataggaagaactgtgacctaagaaaaaacaagtgggacccatgtagattatctgctcaatgttatggtcaaatgactactgctataaaaaacaaaatccattaatcaagaaagtgaactaccattccatggaaggttcgttactaagtaaaaataaaatatgatataaaatatcacatatctgatatcaactgcataaaaaaatgtaaaaataaaatatactgatagggatgcatacccaggttatgaaactatgaagaaaataagaaaacaataattatcattcgcaatactggctccatcaatattttggttcactgtgaaattgttttatgtgttttgaccatatgtaatatttttagtttctagagtggaaactctgtgcagaaataactatcagtgcacatggaaataccagcaacaacctactgaatataatttttaaaaagacaacatagcctgttaaacaaatttgtattacagttaattttctttttaaaaatgtttttattatttttgttttgtttagggacaggttcttgcactgtcacccatgctatggtgcaggggcatgatgacagctcactgtagccttgacttcccaggctcaagctatccctaccttcctgagtagatgataatacaggctcctgccaccacacatggtgaatttcttaatttttgtgaagacggggtctctttatgttgtccaggttggtctcaaactcccgggctcaagccattctcccaccttggcctccaaaagcaattaattttcttgaagtcccaaaaagtctcagaaaggatataaaattattattatccaaaaagtacccatggaaagatatcaatggaaaatgtaataaatgtaaagatgtcatatgtccttaaacacacactgattatcactgtgatgtaatctctctgaaatacatctagtattttattatattccatgaaatgcataggcaggtttgttttttcattaaaattaagaaaaactacttctaaacactgaaatagaagacaatgactaagaatagccagcataagctgggtgtggtagctcacacctgtaatcccagcactttgggaggtggaggtgggcgcatcacctgaggtcaggagttcaagaccagcctagccaacatggtgaaacccctctctactaaaaatacaaaaattagcctggcatggtggcatgtgcctgtagtcccagctactcgggaggctgaggcagggagaattacttgaacccgggaggcggaagttgcagtgagctgagattgcaccactgcactccagcctcggtgacagagcaagactctgtctcaaaaaaaaaaaaaaaaaaaaaaaaaaaagccaggatgttgtataaaatatgactaagggatgttaatgacataaatgtttgcattttcccactccaaatcatacagtgacaccctaacctgtaatacgatggaattaagatggcatctctgagaagtcattagaattagattagagcatgagagtagatccctcgtgaatgggattagtactcttatgagacacaggatagcttgtttcctctttctctctgtcatgtgaaaaaataaaaaaatagctggccgggcgcggtggctcacacatgtaatcccagcactttgggagcctgaggtgggtggatcacgaggtcaggagtttgagaccagcctggccaagatggtgaaaccctgcctctactaaagaatacaaaaaattagctgggcacggtagcaggcacctgtaatcccagctactcggaaggctgaggcaggagaattgcttgaatcccagaggcagaggttgcagtaagccgagatcgcaccactgcactccagcctgggtgacagagcaagactccatctcaaaaaaaaaaaaaaaaaaaaaaaaatagccatctgcaaaccaggaagcaggctcttaccaggcaccagatctgtcagcaccttgaacatggacttcataacttccaggcttccagaactgtcagaaagaaatgtttatttttttatttttttatttttttgagacggagtctcaccgtcaccaggatggagtgcagtggcatgatctcagcttactgcaacctctgcctcccaggttgaagtgatcctcctacctcagcctcctgagtagctgggactacaggtgcgcatcaccaagcccagctaattttttctatttttagtagagacaggctttcaccatgttggccaggatagtctcgatctcttgacctcgtgatccacctgcctcagcctcccaaagtgctgggattacaggcgtgagccaccatgcccggcctagaaattattctttaagtcacccggtttatgggaatttgatataaaagcccaagatgactaagatagataggcactagccctagaatacatcacagctttgagatctatactaataaagagaaaatgatattaacagagagatggaaatatagaccaatggagagggtccatgggtacaaaaacacagaaaaaatgaataagactaagcatttgcaagcacaacaggttgactatagtaaaaaataatatattgtacattttgaaataactaaaagagctgggcatactggcttatgcctgtaatcccagcacttttggaggtggaggcaggattacttgagctcaggaattcgagacaagcctgagcaacatggtgaaaccccgtctctatgaaaaatacaaaaattagctgggtgtggtggaaaacacctgtagttctagctatttgggaagctgaagcaggaagatcacttgaacctgggaggtgggggttgcagtggtgtggctggctcacgcctgtactcccagcactttgggaggctgaggtgggcagatcacgaggtcaagagattgagaccattctggccaacacggtgaaaccccgtctctactaaaaatacaaaaattagctggatgtggtagtgcgtgcctgtagtcccagctacttgggaggctgaggcaggagatttgcttgaacccaggaggcggaggttgcagtgagcagagattgcgccactgcactccagcttgttgatagagtgagactccatctcaaaaaaaaaaaaaaaacaaaacaaaaaaaaaaacaaagcagctgaccaacattcatgttaaaatagatatcaagccaggcacagtggctcacacctgtaatcccagcactttgggatgccaagaaggggcggatcacttgatgtcaggaattcaagatcagcctagccagcatggcgaaaccccttctcaactaaaaaaaatacaaaaattagctgggcgtggtggcagtcaccagctactcaggaggctaaggcacaagaatcgcttggacccaggaggtggaggttgcagtgagccaagatcgtgccactgcactccagcctaggcaacacagtgagactctgtctaaaaaataaagtaatatcaaaagacaaaacagactctttgtggaaataagacacgaaatcttggcaatacaggaagacctcatccctacaaaaaataactagctgggcagagtggcatgcacctgtgagcccagctactcgggaggctcacgatgattgcttgagcccaggaggtcaaggctgtagtgagctgtgatcacaccagtacactccagcctgggtgacagcaagaccctttaaaaaaaaaaaaaaaaagtcctccatcctgcaaagaactgttttttttttttctttctctttttctttttttttttttgagatggagtttcaccgttgcccagtctggagtgcagtggcgcaatctcggctcaccgcaacctctgcctcccaggttcaaccagttctcctgcctcagcctcccgagtagctgggactacaggcttgtgccaccatgcccggctttttttttgtatttttagtagagacagggtttcaccatgttggccaggatggtctcgatctcctgacttggtgatctgtgcgcctcgacctcccaaagtgttgggattacaggcgtgagccaccacgcctggccagaactgatattttgggtactctttgtaattcaccaatctaccatactttcttgtggaaattatttcatttttctccagttaaaatagtaaactttccctatttttctccagtagcattcctaaaactagtccctataacatcattggaaatcacccacaacaaaaggatacacctgagaaatgtactacactgcccgcagagaagaaaaaaacatattaagaaatggaatataagactaaatagcgattttttttttttttttgagatggagactcgccctgtagtgcaggctggaatacagtggtgcaatgtcagctcactgcagcctccacctcccaggttcaagggattctcgtgcctcagtctccctagtagttgggattataggcatgcaccactatactcagctaacttttgtattcttagttgaaacagggtttcatcatgttggccaggttggtcttgaactcctgacctcaggtgatccacctgccttggcctctcaaagtgctgggattacaggtgtgagccactgcatccagccatttttctgaaatctacctctttctggcctgtgtgtaaaattttcttattttgcaaggtctagtgaaaaatgcaaattacaattaataaaaaacctgaagctgcaataagtgaacaattatttacaaaaagacaaacccacagaggggcaatgctgactagaaagaacacagtgatgtttgactcaagtgtcaggccatcctatcacatgggacatttctctgtgcccatcctgctcactgaagtgctgagtgactattttccaacaacactgcactgtgcccctgtgtgccccaagtgcatttccttttttttttttcccctctcttgagacagagtctcactcacttgcccaggctggagtgcagtggtgcgatgtccgctcattgcagaatccacctcccaggtccaagcaattctcaggcctcagcctctggagtagctgggactacaggtgtgtgccatcacacctggctgatttcttttgtatttctagtagagccaaggtttcaccatattggccaggctggtctcaaactcctggcctcaagtgatctacccacctcaacctcccaaagtgttgggattataggcatgagccactgcacctggccagtgcattttcatttacgaggctgaggcaggagaatggcatgaacccgggaggtggagcttgcagtgagcagagattgtgccactacactccagcctgggcgacagagcgagactccgtctcaaaaaaacaaaaacaaaaaacgggccaggcgcagtgactcacacctgtaatcccagcactttgggaggccaaggcgggtggatcacaaggtcaggagatcaagaccatcctggctaacacagtgaaaccccgtctctactaaaaatacaaaaaattagccaggcgtggtgacgggctcctgtagtcccagctacttgggaggctgagtcaggagaatggcgtgaacccgggaggcggagcttgcagtgagtagagatcgcgccactgcactccagcctgggtgacagaacaagactctgtctccaaaaaaaaacaaaaacaaaaacaaatagttgatactacaaattgaagaaggagagttggtgtctgcaaattttagaaaggaactgaaattttagtattgtactgcaagctctccagaggtaggccagggtcacagggtggagggtttgagatctcacttcccatatatttggaaaatgcagagaagtaccagttaactggggagtgttgaaaattttgaataagaagtaattaaacttaatgcctatagtactctaagatcttggccaagaacatggaaatcaaattcaaatgctattcatataaagtactaacttatgtgacggtatgtggcctgagaaaacaataacaagttactaatttattgggaaatgaaatatgggcttaaccaggtacaattggtcgagtaacctctgattatacaaccaaaaattttccactgtatggtctgtgaaaataagtaattcaaaaattgaagctgttggaactctaaattatcttgaagtttaaagtaatgtgactctggaattgagtcacctgacactggaaagagccagctggaaccctcccacacttgactacagattaaccatcagacaggcttcactatacctggacaggcctcattatacccgcttcctttaggagtttccacatagccactgacccaccttcatgttaaaacagacatcagccaactggaaacacagactctctgtgacaataagaaaccaaattacaaacaagacctaaggccatgcaaggcaagaggtaagtcaaatcttagaattcacaaaatctaaagaaacaggtcttttgttttgggtgggatgaaatcatatgacagataccagaccctcttcacttaagcaatccttcctaccgcctcgaagttttagacaaagcttcacactctccaccaacggccaccttcagaatccctcaaccacctgcaccttctaaccccccttccacaggtcccgccctttctgccaaaggaacttacacctttccaggcattgatgcatgattctccctgcaattcctgtctccctgaaatgaataaaaacagtcttgagccgcctcgggaccacttacttcaggcctcctggggttgtgttttcctcagctgaggcctctcctattcggctctgaataaacttctttaagttattttacacagcttggcattttccgttaacaaattacaagccaggactgggtgtttatcattcaggaatctcaaaggaactctaattattaatatattttttaaaacctattctgagaagcaaaactataattgttaacgtgtctcagtttaatttttaagaggagaaaggcgctactggggaccccacagcccaccctcctcctacacaaacccccacacccgaggcgggatccccccatgaccctcgcgtagtccccgcacaatgtggggagacgcggggcagcgggcgcggagctgcccagagagggctctgggaactgggtgacagtcaccgcgcagggacaggacgagacgcccgggtcccggcggccggcccagccccactgtggggccaaggggaccaagggccgagctgtcccacgggaaatcgggtcccagaccccggagtcgccgcggggaggcccgggtcccaccacagccggttccggccggttccaaccagctcctcccccgcctcgggacccctggcccgcacgctcaccatttcttgcctttcaggtgactcccacgaccagtgcgggtcacagcacaggcgacagaagctatggcagaggcacctgaaccctctcggaggggaaagccaggctcccaacctcagctcgccgcctggagccgggaaccgaggagagcagggccttcgccctccccgatggacactcggcaggccccgcccagcgcccctgattggacgaagcgccgggccccgccccctcagccgtgagtgacaatagaagcccttggtaacggggctctgaaaacgggtttgaccggatccagcgatagattctttaagccagaggtctgtaacctttttagcaccagaaccggtttcgtggaagacagttctcctacgggggcagatagtttcggaatgaaacttccacctcagatcaggcattttatcctcataaggcgaacccaacctagatccctcgcatgtgcagctcacaatagggttcgggctcctatgacagactaatgcctctgctgatctgacaggaagcatatctctggcgataatgcccgctggctcgcccgccagccgctcacctcctgctgtgcggactggttccttacaggccatggaccgggggttggggacccctgccatagagtactgttgaatagaaactttagctcgtccggcggtgggctgggggggtgggggtagctcatgcctgtaaccccaccactttgggaagccaaggcaggcagattgcttgagcctaggaacttaagcccagcctgggtaacatagcaaaaccccgcctctacaaaaaatacaaaaattagtcgggcgtggtggtacatgtttgcagtcccagctactcggaaggctgaaatgagaggatcgcctgagcccagagaggtcgaggccacagtgagctgtgattttaccagcctggatgtcagagtgagaccctgtctccgaaaaaaaaaaaaaaaaaaaagacagggaattgcagtggagtttaatatacatagagccggctaaatgaaagagaagagttttatttttattcaattctgtctccctaaaaaatgggaggctaggttttgtttttttggtttttttttgagacggaatctctctgtcgcccatgctggagtgcagtggcgcaatctcggctcagtgcaacctccgcctcccgggttcaagcgattctcctgcctcaacctcctgagtagctgggattacaggcatgcgccaccatgcccggctaatttttgtatttttagtagagacggggtttaccatgttggtcaggctggtctcaaactcctgacctcatgatccacccgcctcggcctcccaaagtgctgggattacaggcctgagcccccgcacccggccgaggctagggttttaaagataatttggtgagcagaaggctggaaaatggggaatgctgattggtcgcgaaaaggatatcacaggaagtctcagctgtcttcttgcactgagtcagttcttggctaggggccactggagcaggtgagccagtttattggtctgtgtgatgccagcaaatttatcagaatgaagggtctcaaaaatacctcaaacaccaatcttaggtcttacaacaataatattatccacaggagcaagtgagaaggttgggaatcttgtgtactctggccgcatatttcctgaaccataatttctaatcttgtggctaatttcttagttttacaaaggcaatctggttcccaagcaaggagacaatttctttacggaagcggcagttatgacttttgctttaaagctaaactaaactccttccaatattagtaagacctatacccgggaatgaacaagggtagcttggaggctaaagaaaagatggagttcgcttagatctgatctctttcactgtcataattttctcactgttataattcttgcaaaagggttttcagatgtagagtcatacttttagctcctggcaacatttatgttggaactcttatacagcaactaaatcactggaacaggataattggttgaggatttactaactgctccatcaggtggaagtggcactccttactaatttacctgaaagcactatttcctgagccatggagactgagtatagcaatgatatgtgatctaaagaagttcccactctgcttcttctctgcagtgaagtcctgccaggcacgttactacttccactgccactttttcctcctccaaatgtggctaagcaattacttcccttatggaagactgtacaaagatgaaaacatggctaggttgatggggtcactctgagacaaggtagacttatgttatactttttgcaaaggtgacttcagatatggaatcataattttagctgctggcagcaatgatgttggaattcatatacagacactaaatgactggaaaaggacaattggttgaaggtttactaattgttccctcaagaggaagtgccattccctattgatttaattgacagcactatttcctcagccatggaaactgagtacagcaataatatgtgatctaaagaacattccactctgagggccagatgcagtggctcatgcctataatcccaacattttaggaggccaaggcaggcagatcacgtgaggtcaggagttaaagaccagccttgccaacacagtgaaaccccatctctactaaaatcacacaaattagctgggtgtgggctgggtttggtggctcacacctgtaatcccagcactttgggaggtcgaggtgggcagatcatctgaggtcaggaaatcaagaccagcctgaccaacatggagaaactccatctctattaaaaatacaaaattagctgggcatgctggcacatgcctgtaatcccaggtactcgggaggctgaggcatgagaattgcttgaacctgggaggtggaggctgcagtgagctgagatcgcgccactgcactccagcctgggtgacagcgtgagactctatcttcaaaaaaaaaaggctgggcgcggtggctcatgcctgtaatccccacactttgagaggccgaggcgggtggattacctgaggtcaggagttcaagaccagcctggccaacatggtgaaaccccgtctctacttaaaatacaaaaaattagccgggcgtggtggtatgtacctgcaatccctgctactcgggaggctgaggcaggagaattgcttgaacctgggaggcagaggttgcagtgagccgagatcgcaccactgcactccaatctgggggacaagagcgagacttcgtctcaaaaacaaaacaaaaaaaaaaaactttctactctgcttcttccctctggtaatgttctgccaggtacattagtacttccagacactttttcctcctccaaaggtagctaagcaattgttatttccctcatggaaaactaagtataaatgggaatatagctagaccaatgaggtcatgcagaggcaaaggagacttatgttgtttatcaagttttcttttcagtaccttaattttcacttctatttgtttaattttttatttttttggagacagagcctcactctgtcatccaggctggaatgtactagcgtgatctcagctcactgcaacctctacctcccgggttaaagcaatcctcttacctcagcctcctgagtagccgggaccacaggcccgtgccaccatgcctggctaattttagtgttagtttgtagacacaaattctcactatgttgcccaggctggtcttaaactcctgggctccagcaatctgcccactttgacctctcacacagtgctgggattgattacaggcctgagcaaccatgcccggccttcatttctactttttgattattttaaaatttatttatttttctttatttttagagacaagatcttcctacctagtccagactggggaacagtgcagcattaaactaatcctcctgactcagcttcctgacaagcagtgaccatagacacatgccaccacacctggatattttacaaaattaacagtacctaaatatggccgggcagggtggctcactcctgtaatcccagcactttgggaggccgaggcaggtggatcacctgaggtcaggagttcgagaccaacctggacaacatggtgaaacctcgtctctactaaatatacaaaaattatctgggcgtggtggcgggcacctgtaatcctagctactcaggaggctgaggcaggagaatcacttgaacccggaaggcggaggttgcagtgagccaagatcatgccacttcactccagcctgggcaacagagcaaaactatgtcttaaaaaaaaaaaaaaaaaaaaaaaaaaactggccaggcgcggtggctcacgcctgtaatcccagcactttgggaggccaaggctggcaggtcaggaggtcaggagttcgcgaccagcctggccaacatagtgaaaccccgtctctactaaaagtacaaaaaaattagccaggcgtggtggtggggggcctgtaatctcagctacttgggaggttgaggcaggagaattgctttaacccacgagacggaggttgcagtgagatgagattgtgccattgcactccagcctgggtgacagaacgagactctgtctcaaaaaaaaaaaaaaaaaaaaaaactggccaggcgcggtggctcacgcctgtaatcccagcactttgggaggccgaggcgggcagatcacgatgtcgggagatggagaccatcctgactaacacggtgaaaccccgtctctactaaaaatacaaaaaattagtcaggcgtggtggcgggcgcctgtagtcccagctactcgggaggctgaggcaggagaatggcgtgaacccgggaggcggagcttgcagtgagcggagatggcgccactgcactccagcctgggggacagagcaagactccgtctcaaaaaaaaaaaaaaaaaaaaacaggccgggagtggtggctcacgcctgtaatcccagcactttgggaggccaaggcaggcggatcgcaaggtcaacagatcaagaccaccctggccaacatgggaaaaccccgtctctactaaaaatacaaaaattagctaggtgtggtggcgcatgcctgtagtcccaactacttaggaaactgaggcaagagaatcccttgaaccagggagacggaggctgcagtgagccaagatcacgccactgcattccaggctggcgacagagcaagagtccatctcaaaaaaataaataaataaaagtataaaatttagctaaacatgggggcacacgcctgtagtcccagctactcagaaggctgaggcaggagaactgcttgaacccaggaggtggacgttgcagtgagccgagatcacgccactgcactccaacctgggtgacaagagcgagactctgtctcaaaaaaaaaaaaaagaaagaaattccacataccaaactagtcccaggaataaatatgcaatttattaaacaagaaaataacagcctaacacaatagccaaaaaagttaaaatttcagaaatatttgttttcccatgaaaactagatagccagtcatggtggctcatgcctgtaatttcagcacgttgggaggccaaggcagaaggactgtttgaacccaggagttctagagtaccgtggacaacatagggagaccaggtctctacaaaaaattaagaaattagatgggtgtggccgggcgcggtggctcatgcctgtaatcccagcactttgggaggccaaggtgggcagatcgcaaggtgaggagtttgagaccagcctggccaatatggtgaaaccccatctctactaaaaatacaaaattaaccgggcgttgtggcacatgcctgtaatcccagctgagattgtgccactgcactccagcctgggcgacagagcgaggctccgtctcaaaaaaaaaaaaatatatagaaaagaaaagaaattagatgggtgtgggccaggcgcggtggctcacgcctgtaatcccagccttctgggaggccgaggcgggcggatcacaaggtcaggagatcgagaccatcctggctaacacggtgaaaccccttctctactaaaaaatacaaaaaattagccgggtatggtggcgggcgcctgtagtcccagctactcgggaggctgaggcaggagaatggtgtgaacccaggaggtggagcctgcagtgagccgagatcgtgccactgcattccagcactccagcctgggcgacagagcaagactctgtctcaaaaaaaaaaaaaaaaaaaaattagatgggtgtggtggctcacatttgtagtcccagctgttcgggaggctgagatgggaggatcccatgggcctgggagacataggctgcagtgagcagtgatcaagccactgcactccagcctaagtgacagatggagactgtcccaaacaaaacaaactaagcagaaaaactaaggatagcaccttcgaatttgtccctaagttgtcaaagtcttggacccccactgaaggaattccctggtacttagacaccagataaagcagaagtgaagactgcactctaattatcctcctttgttttaggtttcttcctgaaggacttgtgaaaagtcacttcctctacttttttttctgctgacccccaaattttaaacaaagcttttcttccctaaggaattgcaaatcagaaaatctttaaactgtaagccccagctttaaaatatcccaccctttcaagcataaaccaatgagtaatctccatgtattcatttgttattttgcctgtagcatctacattcctaaaacttacccctgcttctaaaaatccctgcctgcaatccagtgggggaggtcaggatttaagactttggctgggcgcagtggctcacgcctataatcccggcactttcggaggctgaggcgggcggatcacaaggtcaggagatcaagaccatcctggctaacatggtgaaaccccatctctactaaaaatacaaaaaaaaaaaaaaagactttatgcctgtgtggtcctccttgattgggactctgcaataaaaggctttttccacatcacttcaaaccccagtgtaaatgcctggctttccagggcaaggcaactggatcacagttctgtcctcaacccctggggctctggttgcaaggctggaaatagacaggctttctcccacatctttctcactttcatgtaggaaagaagtagtttccttctttaaaatcaaaactgttttatcctcaggatatgtacctgcacggacatcataaagttaacttttcagaatatgtttatcagccaggtagagtggcttacagctataatcctagcacttttggaaactaaggtgggaggattgctcatgactaggtgttcacaaccagcctgagcaatggaatgagaacctgtctctatgaaaggaatgaaaaatgagctaagaatggtgatacctgtctgtagtcatagctactcagaaggctaaggcaagaggatcatttgagcccaagagttcaaggctgcagggaactgtgattgcaccactgcacttcaacctgggtgacagagggacaccctgtctcccaaaacacacacacacacacacacacacacacaaatacatatatacatctatgtatgtatgtaaatatcctatatattttccttatgcattttaaatatagttatatgttaaaatatacatgcatatttatatacaaaatataaatatgtatatttcatcttatttatttatttatttatttatttttgagatggagtttcactcttgttgcccaggctggagtgcaatggcacaatctcggcttactgcaacctctgcctcccgggttcaagcgattctcctgcctcagcctcccaagtagctgggattacaggtgcctgccaccacacctggctaattttgtatttttagtagagatggggtttctctatgtcgatcaggctggtctcgaactcccaacctcaggtgatctccctgcctccacctcccaaagtgctgggattacaggcatgagccactgtgcctggcctattttattttattatgtaatagagataacgtctcaccatattgcccaagctggtctcaacctcttcagcttaagcaatcctcctgccttggcttcccaaaatgctgagattacaggtgtctctgcagtgaatccttccgtgcatttgaagttctgagtcccatctaaggactttaccatattgcttacatccatagagtttctagccagcgtgagtccttacatgcttttgaaggattgaggcagatctaaaggctttaccacattgcttacactcatagggtttctctccagtatgaatcctttcatggtagagaaaagagttggaagaaatgaaggctttcccacactgtttacatttatagggtttctctccagtgtgagtccttttatgatagcgaatagaattagaagaaatgaaggcttttccacattgcttacactcatagggtttctctcctgtgtgagtcctttcatgcattttaagttgtgaggcaactctaaagactttaccacattgcttacatccatagggtttctctcctgtgtgagttcgtatgtgcttttgaaggactgaggcagatctgaaggctttcccacattgcttacactcatagggtttctctccagtgtgagtcctttcatgatagtgaaaggaattggaagaagtgaaggttttcccacattgtttacattcaaagggtttctctccagtgtgtgtcctttcatgtattcgaagatccttgacaaaactgaaggctttcacacattttttacattcataaggtttctctccagtgtgagtcttttcatgatagcgaaaggaagtggaagaaataaatcccttaccacatagcttacactcatagggtttctctccagtgtgttttctttcatgtactcgcaggtacttgacagatctgaaggctttcctacattgtgtacactcatagggtttctctccactgtgagtcctttcatgatattgaaaggaactgggacaattgaaggctttatcacattgcttgcatttatagcgtttctctccagtgtgacttttctcgtgtctttttaacgaactgggagaaaaaaaggctttcccacatatgttacatttatgaggtctctctccagtgtgcattctcatgtgtgtctgaaagcttacaagataagataatgctttcccacactgcttacattcatagggtttttttgcagagtggattctttcatgtctacgaacagaactgggaaaactgaatgctttcccacactgcttacattcatagggtttttttgcagagtggattctttcatgtctacgaacagaactgggaaacctgaatgctttcccacattccttacattcataaggcttttccccagtgtgagttcttccatgtattgcaaggctactggaataactaaaggctctgaggtgcctattaagggatgaaagacctatgccgatttctccacacacactgctttcatatgattgtactccaggagttttcttcttcagtgtgtcatctggaacctgtgtcaaaacttctccatgctgatgactttctttactttcagagagtctctcccctataagtcttctgtgaacaatgaaagcacattataatgggtttatcactaattttaattcctttgcaagtattacacttgcatttttaacagtgcccagcaaagtgtaggctttctgtcctgtctgaacatgaatggaacacatgctatacaagatggcctagccaggccaggcatggtggctcacgcctgtaatcccagcactttgggaggccgaggagggtggatcatgaggtcaggagatcgagaccatcctggctaacatggtgaaaccctgtctctactaaaaaatacaaaaaattagccgggcgtggtggcaggtgcctgcagtcccagctacggggaggctgaggcaggagaatagtgtgaacccgggaggcagagcttacagtgagccgagatcacaccgctgcactccagcctgggtgacagagcgagacactgtctcaaacaaacaaacaaagatggcccagccatatctcttatcaaaaaagataatattgatacagggattttaaatgctttatttatttatttatttatttatgagaccaagtctcactctgtcgtcaggctggagtgcagtggcaccatcctggctcactgcaacctccgcctcccaggttcaagcgattctcctgcctcagcctcccaaggactacaggcacgcaccaccacgcccagctaatttctcgtatttttagtagagacaggctttcaccatgttggccaggatggtctcaatctcttgacctcatgatccacccacctcagccttccaaagtgctgggattacaggtgtgagccaccatgtccagcttttacatgctattttaaagtagactattttataaatacggtctttgtctttttgtctgtttagttttgagtcagggtctcaccctgtggcccaggctgccctccagtgatgccatcatgactcagtgcaacctcaaactcccaggttcaagcgatcttccatcctgacctccaaaagggctggattatacacataagccatgtcacactttatatgtttctagggaagcttttctaagaataaatacattggaactaggtttgtttcttatgcttgcttctttttaaccttttcttccattctaagattgtatacagagacattgttttctcttttaagtgccagttaccttaggtttctcctaggattttggtgctcatcttcaatgtactggttgttccatttttttcctaaaatgcggacccagaaaaatagtcctgaattagtataaaattattttaaaaagttacttgattctatgtccatggctcattgcacctgtgtctcatttattcaaagtattccctgaccatattccaaatcactcaacagcactgatgagctagaaacacctgttctttaattcactgagggaagtaatactgtcattcttacctatggaggtcaggttcctcaaggtttcctgcatcacttccctgtagagatttttctgggaaggatccagcaaagcccactcctcctgggtgaagttcacagccacatcctcaaaggccaccgaatcctgaaatatcccacatgtggacaggaggatgagtgaggctgacagcactgggtttctataccctattcctaggaagttctcaggatgctgtggtgtgtggactccaaacatttattccatgacttggtcatcagatcccttactctgtctacactcactttcttccataaaacaattttgatgctagagttgaactctggatggggtaaagcaacagcagaataggaaaaatgtgtgtttctggtgagtccagggagaaagtcgtgctgcctggactgcccttaatgtccgaagtgtggatctgcagcacctatcttaacaaactcctttgaatttctgagcaaaacaaatttaacgtgagcagccctaagcctgcatattcttgaaaacgcctgttcacaaagttgaacctttgtgatgactagaaagtgggttttcttctgattccagtagcagaagccaaaaacaaaaaaactgggtttggcaaggggctttattaatctaactgataagagagtctggccaggcacggtggctcatgcctataaatctcagcactttgggaggtgaaggcgggcggatcgcctgaggtcaggagtttgagaccaacctggccaacatggcaaaaccccgtctctactaaaaataataaaattagccaggcatagtgatgggctcctgtaattccagctacttgggagactgaagcaggagaatcacttgaacccatgaggcagaggttgcagtgagccaaaaacgtgccaccacactccagcctgggtgacagagccagactccatcggttaaaaaaaaaaaaaaattctaattgataagagagtcataactaactaaaacaaaaactcacaaaaagaaacctttctgggaaactgtatgtagatagaaaaacctaaactgggctggacacagtggctcatgcctataattccagcactttgggaggccaaggcgggcagatcacctgatgtcagcagttcaagaccagcatgatcaatatgatgaaaccctgtctctactaatagataatcccaagtgttggtaaaccacaaaaataaagacacacacatgaaaggctagatggttgatccatacatacactctactggcattatctttcaaattggaatttatccataatatacaacccagtgacttttcccccaatatgtgagaaatttatgttccattttcatatggcaaagaaaaccaaccatgacattgtcaccaaggtcaaaaactaaactgtaaacccaaatcccattaagcagtgaaatgcataagtaaactgggcaacccatgactcaacacagtggcatgtttgcaacagaatgaggcaaaaagtcagaaacaaacccttttggtataacatgaaaggtacattaattgcaatactaagttactggaaactccaaacagccaaaattctactttgtgataaaagaaaatatggcaggcctgggctgggcgcggtggctcatgcctgtaatcccagcactttgggaggccgaggcgggtggatcacgaggtcaggagattgagaccatcctggctaacaccgtgaaaccgcatctctactaaaaatacataaaactagccggtcttggtggcgggcgcctatagtcccagctactcgggaggctgaggtaggagaatggcatgaacccgggaggcggagcttgcagtgagccaagatcgagccactgcactccagcctgggcgactgaacgagactccatctcaaaaaaagaaaaaaaaaaaagaaaaaatatggcaggcctggcacagtggctcacacctgtaatcccagcactttaggaggcaggcacagatggatcacctgagctcaggagttcgagaccagcctggccaaccaggtgaaaccacgtctctactaaaaatacgaatatcagctgggcatggtggcaggcgcttgtaatcccagctacttggggggccgaggcagcagaatcacttgaacctaggaggtagagattacaatgagccaagatcgtgcattgcactccagcttgggcaacagagcaagactctgtctcaaaaaaaaaaaaaaagaaaagaaaaagaaaagaaaagaaagaaaggctgggcgcggtgcctcagcactttgggaaactgaggtgggcagatcacaaagtcaggagtttgagaccagcctggccaatatagtgaaactccatctctactaaaaatataaaaattagctgggtgtggtggtatgcacctgtagtcccagctactcgggaagctaaggcaggagaatcgcttgaacccaggaggcagatgttgcagtgagccgagatcacgccactgcactccagcctgggcgagaggcagctccgtctcaaaaaaaaaaaaaaaaagataatacagctacaaagaataacaaaaagaaggctgggtgcggtggctcatgtctgtaattccagcactttgggaggtggatcacctgaggtcaggagttcaagaccagctcagccaaagtggtgaaaccccatctctactaaaaatacaaaaattagccaggtgtggtggcaggtgcctgtaatcccagctacttgggaggctgaggaaggagaatcgcttggacccaggagatagaagttgtagtgagcagagatggtgtcactgcactccagcctgagcgacagagcgagactccctctcaaaaaaaaaaaaaaaaaaaaagaataacaggccgggcacagtggctcacacctgtaatcccaacactttgggaagccaaggcgggtggagcatgaggtcaggagttcaagaccagcttggccaacctagtgaaaccccatctctactaaaaatacaaaaattagccaggtgtggtggcgcatgcctgtaatcccagctactcgggaggctgaggcaggagaatcacttgaacctgggaggtggaggttgcagtgagctgaactcacgccattgtactccagcttgggcaacaagagcgaaactccatctcaaaaaaaaaaagaataaccaaaagaatcaaaattttgaccacctttgtgtgccatagttagatgacatcaaagaaacacaccagaactgcccaaggactattcattttcctgggtggtgttcccaagtatattcttactgacatggcatccaattttaaaacatccaattttggccgggtgcggtggctcatgcctgtaatcccagcactgtgggaggccaaagcaggcagatcacctgagatcaggagtttgagaccagcctggccaacatggtgaaaccctgtctctactaaaaatacaaaaattagccaggtatggtggcatgcacctgtagtcccagctacttgggaggctgaagcaggagaatcgattgaacccgggaggtggagtttgcagtgagccaagattatgccagtgcactccagcctgggcgacagaaagagactccgtctcaaaagtaaataaataaataaataagaagcaattaaactgaactggctatagaacactaagacccttcacaagcatactgaagccaaattcaaatccaattcacataaatttctaatctgtggcctgaggaaacaatatcactaatgactaatttatagggaaatgaaatttaggcttaaccaggcacaataggtcaattaatctctgattacataaccaaaagtttcacctgtacagaatgtgaaaataggtgattcaaaaatttaagctgctggaactctaaattatcttgaggtttaaaggaatgccattctggggttgagacacctcacaggcagcggtaacagagccagccagggaaccttccattccctgattacagattagctttctttcttacctatattgttttgtaaaatattttaaatgacaagcaagtcaggaaagaccccttccctcttaaggattgatttcattatagactaacttccctcttacttttcttacacaaagacttcatggccatcacatcttctgaagctggaaatgttaaattcacttttttaaataagaaaagaaatgaaaaccggccgcgcgcggtggctcacgcctgtaatcccagcactttggaaggccgaggtgggtggatcacgaggtcaggagatcgagaccatcctggctaacacggtgaaaccccgtctctactaaaaaatacaaaaaaattagccgggcgcggtggcgggcgcctgtagtcccagctacttgggaggctgaggcaggacaatggcgtgaacccgggaggcggagcttgcagtgagcagagatcgcgccactgcactccagcctgggtgacagagtgagactccgtctcaaaaaaaaaaaaaaaaaaaaaaagaaaagaaaagaaattaaaaccccttgcaaagaaaattttaaagtcctgggccgggcgcggtggctcacgcctgtaatctgatacaggagaatcgcttgaaccggggaggcggaggttgcagtgagccgagattgcgccattgcactccagtctcggcaacaagagcgaaactccgtctcaaacaaacaaacaaaaaaacctgtaactaaattgtataattaatttagttgtactaattagttgtattaaattaattgtacaattaatttagttgtactaattgttgcgataattaaatttctttgttttttgcctatataagaaggagcttaactttttttttttgagacagtctcattctttcaccatggctggagtgcagtggggcattccactgtaatcccagcactttgggaggccgaggagggtggatcacgaggtcaggagttcgagaccagcctggccaatatcatgaaaccccgtctctactaaaaatacaaaaattggccgggcgcagtggctcacgcctgtaatcccagtaccttgggaggccgaagtgggcggatcacaaagtcaggaggagttcaagaccagcctggccaatatggtgaaacccgtttctactaaaaatacaaaaattagccgggcgtggtggctggcgcctgtagtcccagctactcgggaggctgaggcaagagaatcgcttgaacccgggaggcggaggttgcagtgagccgagatggcgccacagcacttcagcctggggcgacggagcgagactccgtctcaaaaatataaaaatctggtaaaataaaaacaggtcttttggggaagggggcggggactgggatggaataacgtggcagataacagccctccttcctacagcctccaaattttagacaaagctttacacactctcaaccaactgccacctacagaatccctccaccacctgtgccttctaaccccgcttccatgtgtcccgcctttcggccaaaggaacttacaccttcccggcactgattcatcattttcctgcaattcctgtctccctgaaatgaataaaaccaaactgtcaggagctgcctcgggattgcttactccagacttcgcggggttgtgtttccctcagccgaggtctctcctattcggctcagaataaacttattctacacgatttgggtttttccgttaccaaaccacaagccaggactgggagtttctcattcattaatcgctgtttgctaaaataaactctcattttttaacagtgcctcagtttaatttttaactggaaaaaaaaaggaactggggaccccacagcccacagctcctcccacacgaaccccacacccgaggcaggatcccccatgacccttccatggtcaccgcacaatctggggagacgcggggctgcgggcgcggagctgctcagagagggagccggggccggggccgcagtcgccgcgcagggaccggacaggacgcccggggtcccggctgccggcccagctccacccagcggccgaggggaccgagggccgagctgcgctagggggactgtgtctggagcccagagtcgctgcaggggggcccgggccccgccacagcgggttcctctcggttccacccagtccctcctttcgccttgggactccccagcaccgcatgctcaccatttcctggcttccaggtattctggcgtcctctctaaaggtcccgtgaacagtgcaggtcacagcgcagtcgacagagcaacagcagctacggcggaagtaactggtccctctcggagcaagaaagccccagaccttaactagcgcgagcagccctaggagtgaagagagcgggaatgcaacctccccttccctggaggacagtggcagggccccgccctagcgcccctgattggataggggtctagactccgcccccttccctgagtgacagcagaagccccgggtaactgggcgctgcagagccgaagcgactggttctggccacactttccaaggtcagctccctccctccctcccacctttacttcgaatatttgccttcggccaaacttgctccgaactgctagaagggacactgttgtcttcctcactccgtgggccgtccctgccccttcatcctacacgggacacaagtgtgcagggaattccagattcagtgtccacaaaatgtgaaagacattaaaatattttgccccaagatattgccctgccaaaatatatttctttgacagttttgaaatggctgctgcttggccagcaaacaaaaggtggccttgcaaaactgtcttttgagggggaaatttacatttgtagagaatctccgttaatgaagcactgccagctcccccgttcttttcctttccctgatctaaaagctattgagagtttgacacctttaaaatctgaagagaggtagcacatggtgactcatgtctataatcccaccacattggcaaactgaggcggaaggatcccttgaagcaaggagtttgaggccaacatcatcaacacagcgagatccctgtctttctttcttttttttttttttttttagacagtctcgatctgtcgcccaggctggagcacagtggcacgagatcttggctcactgcaacctccgcctcccaggttcaagcgattctcctgccccagcctcccaaatagctgggattacagacatgcgccaccacgccccgctaattttgtatttttagtagagacggggtttctccatgttggtcaggctggtctcgaactcacgacctcaggtgatccgcccgcctcggcctcctaaagtgctgggattacaggcgtgagccacctcgcccgccgatccctgtctttattatttaaaatttttttaaatggccgggcgctggccgggcgcagtggctcacgcctgtaatcccagcactttgggagaccgaggtgggcggatcacgaggtcaggagatcgagaccatcctggctaatacggtgaaaccccgtctctactaaaaatacaaaaaaaaaattagccgggcgtggtggtgggcgcctgtagtcccagctactcgggaggctgaggcaggagaatggcgagaacacgggaggtggagcttgtagtgagcagagatcgcaccactgtactccagcctgggccacagagcaagactgtgtctcaaaaaaacaaaacaaaacaaaacaaaaaaccagtggccgggcgcagtgagaccaggtctctaccaaaaagataagtaaatagattagggccaggcatggtggctcatgcctgtaatcccagcactttgggaggccgaggtgggtggatcacttgaggtcaggagtttgagaccagcctggccaacttgacgaaatcccatctctaccaaaaatataaaaatgagctgggtttggtggcacacacctgtgatcccagctattcggggggctgaagcaggacaattgcttgaacccagaagacggaggttgtagtgagcagagattgcaccattacactcgagcctaggtgacagagtgagaccttgtctcataaaaaggaaaaaagtctattctctgggggagacatcatctacgtaacagtccacctctagccaagcctcttcctttctcagtctactaagctgtcttgctactaaacctaatttactgacctcaggtcgctatataatcttctctgtcttatagctgggtgtgtcttcattctgaaggttcccatgtatacatgttaaatacatttgcatgccttcttttctattaatcaatctgcctcagatcaattagttttcagcaaacctttaggacacgaagagtctatcacccccacaaagccatccccttgtctcagggcaggaggggaacaaggccatgtatgactgctccaggagggagagacagatctcctgcagtggggcaagaatcgggatgaggcatggccaaggtttcctcacatacacccatcttctcctcacagtgtggaaactccccctcctctccacaccttcattttcattagcgggaaactctcacctggagtcagtttaatcttattaccagaaaggggtaccaatccagaccccaaaagagagttcttggacctcatgtaagaacaaattcagggtgagtccataaagtaaaagcaagtttattacagaagtaaagaaacaaaagaatggctactccatagacagagcagcagcatggtctgcctgacaatgtatacttatagttatttcttgattatgtgctaaacaaggggtggattattcatgagtgttctgggaaaggggcaggcaattcccagaactgagggttcctacctcttgttataccacatagggtaacgtctggatattgccatggtatttgtaaactgccatggcgcttgtgggagtgtttgttagcatgttaatgctttataattagtgtataataagtagtgaggaccacataaggtcactttcttttcttttctttttttttttgagacagagtctcactccctcgcccaggctggagtgcagcagcgcaatcatagctcgctgcagcctctctgccttcctgcagcccctgcctcccaggctcaagcaatcctcccagctcagcctcctgagtagctgagactacagccacaggccaccacaatcagctaatttttgtattttttgtagagatggggtatcactgtgttgcccagggtggcagaggtcactttcgtcgccaacttggttttggtgggctttggctggtttcttcagcgcattctgttttatcagtggggtctttatgacctgtatcttgtgataccagtcctgccgacctcctagctcatcctgtgactaagaacgcctaatcacctgggaatgcagcccagtaggtctcacccttattttacccagcccctattcaagatggtttcactctgcttcaaacacccctgacattatgacttaaataaagtcaactttataaaccctttgttcataacacaacccaaacaatttgttctctgaggctgaccttcacagatttgcttcatatatatcaattacagtctgtccccagcgaccctgtgcatgccaaaaccaaaacactgcccagaaaatagctccaggcctgaaggtacctctgaaaggtacaaccccagataggacagaacccccgagcgcatctgcacgtgggtcttctgccatccagggctctgcagcttcccagaatccacactccttctggagctggaggccaccttcaagggagggcgggctccgggggaagcccccaggagtttgcaaaaggagccccctttccctccttttgcaaactccagactagcctcagcggggagtcattggcctccggctctgctgccccctacaggttattaagccgcttcttaccccattgatcagttcctagaaacaaacaccctcaatcccagtgtgtgaataagacgccagcagagtctctgctttcctcctgtggtgcttttttttattttgttttgtttgtttgtttgtgacggagtctcgctctgtcgcccaggctggagtgcagtggcgcgatctcggctcactgcaagctcctcctcccgggttcaggccattctcctgcctcagtctcctgagtagctgggactacacaggcgcccgccaccacgcgcggctaattttttttttttttttttttggagactgagtttcactcttgttgcccaggccggagtgcagtggcgcgatctcggctcactacaagctccgcctcccgggttctcgccattctcctgccgcagcctcccgagtaactgggactacaggtgccggccaccgcgcccggctaattttttgtatttttagtagagacggggtttcactgtgttagccaggatgctctcgatctcctgacctcgtgatccgcccgcgtcggcctcccaaagtgttggaattacaggcgtgagccaccgcgcccggcctcctcctgtgcgttatgtatgacataaggaaaaacaggctgggtgcggtggctcatgcctgtaatcccagcactttgggaggccaaggcgggcagatcatgaggtcaggagttcgagaccagcagcctggccaacatagtgaaacctcgtctcttctaaaaatacaaaaaattagccaggcgtggtggcaggcgcctgtagtcccagctacttggggggctgaggaaggagaatcgcttgaacccgggagggagaggttgtggtgagccgagatcgcgccactgcactccagcctgggcaacaagagtgaaactcagtctcaaaaaaaaaaaaaaaaaaaaattagccaggcgaatagcttgaacctgagaggtggaggttgcagtgagccgagatggcaccactgcactccatcctgggcgacagaacgagactccatcagaaagaaaagaaaggaaggaaaaaaagaagggaagggaaagggacaggaggggacgataggggaggggaggcggtcgggagggatgtgcagcccaggaggagaaggaagggggccagggaggcttagtcagtgggcggtgggtgtgtgggtgtgtgtcctgtcagcttcacattgtccaaaggatcagaattcagttgtgagtttatgaaagtgaaaagcagggaatggcctttctggaaaacacatacttcaaagaaatgggctcagttctttcttactcagattttgaacaactcattttcacaaccccaaaccctctgcaggtcacatttcctcctctcattttggtcttggcctgaaccctacctgctctccttgcacccttgttcccagcaaaccgaggattgggctgcttattctctgtgcccaataatgagatgcagatgaactgggaaagaagagttgcttgctttatttattttttttatttttttgaaatggaggcttgctctgtctcccaggctggagtgcagtggcgcgatcttggctcactgaacctccacctctctggttcaagcgattcttgtgcctcactcagcctctcgagtaactgagattacaggcatgcaccaccacgcctggctaatttttgtatttttagtagagacggggtttcaccatgctggcctccaactcctggcctcaagtgatgtgcccgcctgggcagcccaaagtgctgggattacaggcgtgagccaccgtgcctggcctaggtttttaacggtattcctaaggaaacacaaatcatggcatgagtgtgtcctctctagaaaaagaattaaatacaatggttgaagtaagagtagaaactccaccttggagtcttctcccttaatgtgacacaaacatcataggtgagtcttccagacacgattccgccacaactttttttttttgaggcagagttttgcttttgttgtccatgctggagtgcaatggcacgatttccactcaccgcaacctctgcctcctgggttcaagcgattctcctgcctcagcctcccaagtatctgggattacaggcatgcaccaccatgcccagctaatttttgtatttttagtagagacagggtttctcgatgttggtcaggctggtcttgaactcccgacctcaggtgatctgcctgccttggcctcccaaagtgctaagattacaggcgtgagccactgcacccggcctcccccacaacttattacaggctgccaaagagtcaggcaaaacagtgctggcatcctctttttctctgaaaaatgtgtgctatccctccccttggcctctcgcccaccctactccccgtctttgctttcttcctgtcccctcattgtgtccagccagtgccattgtgtccagaccgtgggttcctcagtggccattgcctccaccaccatgatatggaaattttttcttaattaatagagatgtgggctcactattttgcccaggcatttcttgaactcctgggttcaagtgatcctctggcctcagcctcccaaaccgatagaattatgggcgcaagccaccatgcccagcctagaagtcttttaatgcatttacattttcttagaattttccttctttactttacatacacacacaggaggaaagcagggactctgttggtttcttgggttttttgtttgtttgtttgtttgtttgtttgtttgtttgagacagagtcttgctcagtcgcccaggctggagtgcagtggcgcaatctcggctcactgcaagttccagcttccgggttcacgccattctcccgcctcagcctcccgagtagctgggactacaggcacacaccaccacacctggattttttttgtatttttagtagagacagggtttcaccgtgttagccaggtcgatcttctgaccttgtgatccgcccgcctcggcctcccaaagagctgggattgagcactttgccaggtgtgagccactgcgcccggccggtttcttgtttttaaaagatgaggttgaagatctttttgtctgatcatggaggtgaaatgcaggtgaataacctgcagggggcagcagagtctgaggccggtgactccacgctgaggccagcctggagcctacaaagggaagaaaacggagctcccctgagggcttcccaggcagccctccctccccagcaggtggcatccagctgcgcagagcagctgcagaacggctgtggattctgagaaggtgcagaggcctgaaaagctggaaaccttagtgcagatcccctgggggttctgtcctttctgggtttgcctgtctggagcctggggccattttccggacaatgctttggttttgatatgtgtagggtcactagggtcaatagtgtaatttgtatatatgaagaaaatgcgtccaggcaccctggctcttgtctctaatcccaacactttgggagggcgaggtgggtgattaggttgagcaccggagttcaagaccagcctgggcaatatggtgagaccccatcactacaaaaaatacaaaaattagctggttgtggtggtgaatgcatgtatccccagctactcaggaggctgaggtgggaggaacgattgagccctggaggctgcagtgagctgtgatcgcaccaccacacttaagcctaggtgacagtgagactctgtctccaaaaaaaatgtgtggtaagtcaggctcagagacagaattgtttgggatgttgagaaagagttaatgaagttgacagtttattcaggtcacaaacttaaactcaccgcaggtgagagtttcctgacagtgaaaataaagttctggaaggagagagcattttcacactgtgacgaggaatgtggatgtgagaaggccttggccttgcctcattccaaattatcttgacctgcagaacatctgtctctccctcctgatgtagtcttgcctggcctcatctgggctcctctcctactctgaggcaaggggatagctttgatggagcgataggctcttgacccccaaaacatttgctaaaatatcgttgacataaagctgattaatatgagaaaggcatatgaatttatttaccatgtatacagggctgcctttagtaagaagacccacccaacaataagatagaaaagcttatataccatcttgaggctgttactaagggaggagaccacccgtcatattgtcgtatgcccaatttctgcctccaaagaaagaagaagtaaaaactaaaaggcagaaatgaaatccacaagcagacagcccggcgcctcaccctgggcctggtagttaaagatggacccctgacctaatcagttatgttatctatagagtacgcacattgtatagaaaagcactgtgaaaatccctgtcctgttctgttccggtctaattaccggtgtatgtagcccccagtcacgtaccccctgcttgctgaatcgatcacgaccctctcaagtagacccccttagagttgtgagcccttaaaagagacaggaattgctcactcagggagctcggctcttgagacaggagtcttgccgatgctccctgcccagtaaaacgcgtccttctttaactccgtgtctgaggggttttgtctgcggtttgtcctgctacattaccagaaaggggtcctaattcagactccgggagagagttcttggttctcatgaaagaactcagggtgagtccttagagtaaagtgaaagcaagtttattagagaagtaaaatctcaggccaggagcggtggctcatgcctgtaatcctagcactttgggaggctgaggctgccagatcacctgaggtcaggagttcaaaactagcctgggcaacacggtgaaaccctgtctgtactaaaaatacaaaaaaaattagccaggcatggctgcatgtgcctgtagtcccagctactcgggaggctggggcagtgaggtggaggttgcagtgagctgagattgcaccaccacaatccagcctgggcaatagagggatactccatctccaataaaaaaaaatgaattgggtttaacattaataaaatatcagtaataattataatttttatgtgaaattactgtgtgtcacagaaatgaccagaccttaataatggatgttcttcgccgggtgcagtggctcaaagtgctgtaatcccagcactttgggaggaagaagtgggtggatcacgacgtcagggattcaagaccagcctggccaacatggtgaaaccctgtctgtactaaaaatacaaaaaattagctgggtgtagtggtacatacctgtaatcccagctactcaggaggctgtggcaggagaattgcttgaacccaggaggcagaggagatctagaccatcctggctaacacggtgaaaccccctctctactaaaaatacaaaaaaaaaattagccgggcgtggtggcaggcgcctgtagtcccagctactcgggaggctgaggcaggagaatggcgtgaacccaggaggcggagcttgcagtgagctaaaatcgcaccactggactccagcctgggtgacagagcgagactccgtctcaaaaaaataaaaataaaaataaaaacccgggtggacaagaaacaaaaaataaaaagaattttaaaactgtaaaactgttgttgagtactaatgtgctcataactattgagcagaacagaagtttatgacatagactgaactaagggaagactaaaataatctttttatagctttttgtttaaaatattgctaattcttttgtttttcaaagtccagaaaaacttttttttttttttttttgagatggaatctcactttgtcacccaggctggagtgcagtcactcaatctcagcatctcgctcactgcaacctccacctcccaggttcaagtaattctcctgcctcagcctccagagtagctgggattacaggcacccgccaccaggcctggctaatttctgtattttttagtagagactgggtttcgccatgttggccagctggtcttgagctcctgaccttaggtgatctgcccgccttggcctcccaaagtgctgggattacaggcgtgagccaccgtgcctggccataggtatcactttctttacggcccagaacaaatagccctcctaaacaaataatgtacataactcacaaatttcttgcttaccatcaaaaaccttgatttatcaaacatttcaggtgacaaaacaatgcaagttcccaagttgcattctataaaatctctagcaaacctttgtttctttgcagccggctcccttctgctggttctgcctgttgccttcttgcaaggtactttcatattttccttaataaatctgcctttttttttttttttttttttttttttacctacaactgtcttggtaaatccctttttttttttttttttttttttgagatggagtcttgctctgttgcccaggctggagtgcagtggcacaatctcgactcactgcagcctttgcctcccgattctccagcgattctcctgcctcagcctcctgggtagttgggattacaggcgcccaccaccaagcccggctaatttttgtatttttagtagagatggggtttcgccacattggccaggctggtttcaaactcctgacctcaggtgatccgcccgcctcggtctcccaaagtgctgggattacaggtgtgagccacatcgcccggccagtcttgataaattcttttacccttgcgccactggcccagatagtagccactcacccacaacatagatgaagactcccacagagagaatggatgcaaaatgcttcttttaagaatttctggccgggcacggttgctcacgcctgtaatcccagcactttgggaggccgagacgggcggatcacgaggtcaggagatcgagaccatcgtggctaacacggtgaaaccccgtctctactaaaagcacaaaaaattagccaggcatggtggcaggcgcctgtggtcccagctactcgggaggctgagacaggagaatggcgtgaacccgggaggcggagcttgcggtgagccgagatcgcgtcactcactccagcctgggcaacagagcaagacaccatctcaaaaaaaaaaaaaaaaaaaagcaaaaccagaatttcttacttattttgttttttggtctcactctgttgcccaggctggagtgtactggtgcaatcacagctcactgcagccctcgactcctgggccaaagtgattctcctgccctggcctcctaaagtgctggtattacaggccccagccaccttgcctggcctctttccagactttttttgtttttgttttttttgagacggagtttcattcttgttgcccaggctggagtccagtggcatgatctcggctcactgcaacctccgcctcccagcttcaagtgattctcctgcctcagcctcccacatagctaggattacaggcgtccgccaccacgactggctaatattttgtattttagtagagatgtggtttcaccatgttggccaggctggtctcgaactcccgaccacaggtgatatacccgcctcggcctcccaaagtgctgaaattacaggcgtgagccgccgcgcccggctttccagacttttaaaagtgtcagactctcaatttctcccggatcagggaaagggaaaaggggagagggggcatggcttcactaatggaaatactccatagacgcaaatttcaccccccagaagacagttgtgcaagggcaaagctgcagccattcgaaattgccaaataaatatattttggaataaaatattttaattgctttcacctctattaaacatagagtctggaactccctgcacacacttatgacactgtgcaggacgaagaagcagggacagaccattgacagagccacttctagtaattaagacgagcaagtttggccgaaatgcaaattttcaaagagcagggcgtagagagggaacttgaccttggactgtggcttgaagcggtcagtcctgctctgcttggccctgttacccaggacttctgctgtcactcaggatgcagggggcggggcctggcgctccacccaatcagagtcgccggggtggggcccggccaactgtttatccgcgggtcacattgccgttcgcctcagtctttggcccctcccgccgggtgaggttggcaccccgtttttcctgctctgagagggaccggttgccaccgccatacttctgtcgccctgtcgtctgtgttgtgactgctttggacgtgggagtcacctgaaagccaggaaatggtgagtgtgagcccccgctgggagtcccgagacttgggggagggtaggcggaggctggttggaactggctggaaccggctgtgccgggacccggacctccccgcggcgactcgaggtctggggcccgagccccgctggcgcagctcggccttcggtccattcggccgccgggtgcggctgggccggcagccgggacccctgggcgccctgtctcgtcgccgcgcggcgactgcggccccagcccgggagccctctctggacagctccgcgcccgcagcccggagcctctccatattgtgcggggccacgggagggtcatgggggcaatcccgccttgggtgtggggctcgtgcgggaggagctgcgctgtgaggccctcagtgccccctttctcctgttaaaacttaaacaggcccggtgctgggaatagaggcgtgagccaccgcgcctggcctagcgtggagaacttgtgacagcggataaatgttttccctgctgtctgtggcttagagcttggcaactgctgtcgtgtttttgttcacatcatgatcaatgtgtactagatgctttgttgttgtaatcgcctgaggggttcttcctgcctgtgctgcaaaaagaaagaccagggcattgcagtaaagaaaatgtttgacacgagatggaccacgcaacgccgaagacggagacagagttagcactcaaatcagtctccccgaaggcttatagttagggatttttctttaatatttttttcttacaatttttttttttttttttaagacagagtctcgctcttttttgcccaggctggagtgcaatgacacgatctgggctcagtgcaacctctgcctcccggattcaagcgattcttctgctcagcttccctagtagctggggttacaggcacgccaccacgccctgctgatttctgtattttcagtaaagacggggtttcaccgtgttggccaaggtggtcttgaactcctgacctcaggtgatccgcccgcatcggcctcctaaagggctaggattacaggcgtgagccacctggcccggctaaaaattgttttttaaacaaggtctcactctgtcgcccaggttggagtgcatggcgcgatcacggctcactgcatcctggacccacctgagcagcagctcaggtgattgtgctgcctcaccctcccgagtagctgggactacaggcgcaggcggctaatttttgtatttttggtagagatggggtttcgccatgttgcccaggctggtcttgaactcctgggctcaagcgatctgctcacctcggccccccaaagtgctgggtttacaggtgtgagccaccgaactcggccaggggtttttcaaaggcagaatcggggaagaggtggtgggaaatggtcctcctgagtgctgagttgcttatagaggagcagggttggtgggcctgagtggagccatgggtgtcagacaagcaaaaaacctgaaaacacttatctgcagaagtatcttgggaccagtctataccatagcaaaattcaggctcctcatcgctccccactctgttccccccgccccgactcatggtttttcattagctttaggaaggcagtgtttaaggaagagctattatcatttaaactataacataaatgtcttcttttttttttttttttttttttttgttgttgttgttgacggaggctccctctgtcgcccagactggagtgcagtgacgcgatctcggctcactgcaagctctgcctcccgggttcacgccattctcctgcctcagcctccggagtagctgggactacaggcgcctgccaccaagcccggctaattttttgtgtttttagtagagacggggtttcaacgtgttagccaggatggtctggatttcctgacctcatgatccgcccacctcggcctcccaaagtgctgggattacaggcgtgagccacctcgcccggccaaatgtcttctaaagttagctcagcctaagcctaggagtaattaaggcagcttgaaaggtaaagacaagagaagcagttggctagatctctttgactgccataattttttcagtgttacagtttttgcaaaagtggtttcattatcatggaaatagtaataaaataatattgtcaacttaaaaataatgagatttccataaaaaattagctgggtgtggtggtacgctcctgtagtcccagctactccggaggctgaggcaggagaatcacttgaacccgggaggtggagtttgcagtgagctgagatcgcgccactgcactccagcttgggctacagagtgagactccctctcaagtaaaataataataataatgagatttccctggaggccagtcagtcaaggctgcaccgaaccgtgatcacaccactgcactccagtctgggtgacagagtgagaccctgtctcaaaaataagaaaattaggccgggtgcagtggcttacgcctgtaatcccagcgctttgggaggccgggtcgggcaatcacctgagaagttcgagaccaggctggctaacatggtgaaaccccgtctctactaaaaatataaaaattagccaggtgtgatggtggtgcatctataatcccagctactggggaggctgaggcaggggaattgcttgcacctgggaggcggaggttgcagtgagctgagaccacgccattgcactatagcttgggcaacaagagtgaaactctgtctcaaaaaaaaaaaaaaaaaaaaaaaaaaaggccgggcgcggtggctcacgcctgtaatcccagcactttgggaggccgaggtgggtggatcacgaggtcaggagattgagaccagcctggcacacacagtggaactccgtctctactaaaaatacaaaaaattagccgggcgtggtagtgggcacctgtagtcccagctatcagagaggctgaggcaggagacgtgaacccaggaggtggagcttgcagtgagccgagatcgcgccactgcactccagcctgggccacagagcgagactctgtctcaaaaaaaagaaagaaagaaagaaagaaagaaagaaggaaagaaggaaagaaggaaggaaggaaggaaggaaggaaagaaaattaaaaattaatttaaaaatagccaggcatagtgcctcacacctacatcctagcactttaggaggccaaggtgggtgggcgaggggttgtgggatcctttgagctcaggagtttgagaccagtctgggtaacatggtagaacctcatcttaacaaactgcttaaaaaatagccaggcatgatggtatgtgtctgtagtacccagccacttgggaggctgaagtgggaggatggcttgagctgagaggtggaggctgcagtgaggcatgatcatgccactggacttcagcctgggcgacagagcaagaaactgtctcaaaaaataaaaatagagattcaaaaaatatggttaaaggctgggtgcggtggctcacgcctgtaaacccagcaccttgggaggctgaggcgggcagatcatgaggtcaggagttcgagaccagcctgaccaacatggtgaaaccccgtctctattaaaaaaatatatacaaaaattagccgggcatggtggtgggcgcttgtaatcccagctactcaggaggctgaggcaggagaattgcttgaaaccagaaggcggaggttgtagtgagccaagatcgtgccactgcactccagcctgggcaacaagagtgaaactccgtctcaaaaaaaataaaaaataaaataatttaaagttctaatggcttcaggttggaattattgacttccacaaatgtgtgtattgtctgaaatgattagatacttttgctttccattttgtggtacgaaatgcaaatgccttataatttcctttccatgtgtaaacctgaacctgagtttgagggattttgctagattcttcaaacactgggtattttctcattgaatcagacctgagcccagtgactgcaagctaaggtcaatcagaagcctgcaaagaggtcattgaaggctcacttgtttcttgctggggagcctctcctgcagtgtcccagctgctcacactgacccagctgctcacactgaccatgggaggagccctttattctgagagaatctcagagccctggaaaactgaggatccacaggcagatgcagcgggtcagcgatgcctttctgaggctagttgtcctaaggttgtttctaaacatttttaatgaaacagatgtggatttaggtaaggaatgacttttctttttattcttttattcctttttttttttttttttttttgagaccaagtcttgctctgtcacccaggctggaatgcagtggtgtgatctcggctcactgcaacctctgcctcctgggttcaagcaattctcctgtctcagcctcctgagtagctgggattacaggcgcccagcaccatgcccggctaattttttgtattgttagtagagatagggtttcaccatgttggtcaggctggtctcaaactcctgacctcaggtgatccacccaccttggcctcccaaagtgctggaattaacaggggtgagccatcgcgcccagccaggaatgactttattctaaaggagaattgaaataaggaaaagggagaaagtataagatctgtaagcatctcaaagttagcccaaaaaggaattttttttttttttacagagaggagaaaacaaggttaggaagaaggtgagagtgggaggtcaggatacaatttcattcgttaataatttgtattttaggccaggtgcggtggctcacacctataatcctagcactttgggaggccgaggtgggtggatcacctgaggtcaggaatttgatactagcctgaccaacatggtgaaaccccgtctctactaaaaatacaaaaattagccaggcgtggtggcacgtgcctgtagtcccagctactcaggaggctgaggtaggagaatcgcttgaacccaggaggcggaggttgcggagagccaagtttgcgccaactgcactgtagcctggacaacagtgagactccgtctcaaaaaaaaaaaaaaaaaaagaggccgggcgcggtggctcatgcctgtaatcccagctcgcagggaggcaagaggcgggaggatagcttgagcccaggagttcgagacctgcctgggcaatataatgagaccccgttctccacaaaaaggaaaaaaaaaaaaagacaaaaataaaaataagcgtaaaaaaaaaaaaaaaagaaactgaagcatgtgtggtcatgccacgctgaacacatctattctctgtagctaagcagggttgggcctggttagtaaatgtatagaaaatgcctaggaatactggctgttttatgcttaaaaacaaaaaaagaaaggatttcacaagataattcaccaaatggaagaaaaacttctatattgaatatctggtccatcttcttcttcacataggatgggggatgaattggtagccagcactctgaggcatcctggcccattactgcaggaggtgaactctaccctgtagtcctctctggcagtggtgcaaccacagtctccaatctcatcctgtttatagggtgacaacaagaagtggtcatcaggagagaaatctgacctggtgttttggatgtttgagtaggaggtactcccaagaaatccatcttcctccccaccagaagagaacttcttatcactaatgcattgcagacatatgaattagggtctcaagtctaagtctttattccttgtaaagagagattacactgaaaacttggtaaaaatttcaaggaaggttttattcagcacaattgcaatatgtgttgaataaagccttattttttgcctatatgttataggacaatttaatatgggaaagaaattgaactcaacctgaatgcatcaacaagacaattatatctaaagagcaaggtaccgtagaggatggaacttggtgaggtgtcaagagttggggaagagaatattaataaattatcatagatgagggaaacaacttgattagatatcaagttggggggcattctctctaaactctcttattaggatttagctataactgggctctgcaggacaaacacaaaagctagtcaggaagtgggctccgaggagcctcactgaagtatgatcaaggaaggagtccttgagatcctcccagcctagttcttgctagggctgatgataaatccttaagtttctggtttcctccccacgttccagaacactccctcatttcccctttccactggacatcattatcaatcatgtgtcccccatgatacatgtgaaactgctgcagtattttaattgcttaccatttttttccacaaagcaataagtggtgggtatattcaacccattttccatgtgccccgagaatactcttgtctctaatcctaatgtaacatcatatacgtttttgttatattaggattagaaacaagttctgtttagaaattttattttcacattgaaagtcaatcagatttgcttcagctttaaagagtatgcttgtgtaaaattcaatgaatgctggcagcaagctgcacttttttttctaaatgggaaatgggttaaaaatgtattactttatgaatactgttcatgagaggaaagcactcaataaccactaaaaactacattatataaatccttgtgcctgatgactcctggtccactgacgttttcatgagcttcttggcccttttcatatatcttgcaggaatgtcattcagatactttccctatctttcaatcaattaggttttttttttttttttacttggtacaataatttattattgtaaaaaaattaacatttattagctttaggaattttacatgtactgttgagttagtttgtcaaatctatataactcgtctaagatgaataatactgtatttttgtgactggccttttgcaatcagtatagaatcctgaattttttttcttttttttttttttgtttgtttgagatggagtctcactctctcacacagcctggagtgcagtggcatgatcttggctcactgcaacctctgcctcctgggttcaagctgttctctgcctcagcctcccaagtagctgggattccaggcatccaccaccatgcccagctaatttttgtatttttagtagagatggggtttcaccatctaggccaggctggtcttgaactcctgacctcgtgatccactctgcctcggcctcccaaagtgctgggattacgggcatgagccactgcatccagctgaatcctgaattttcatgctttttgtagcatgggacagaaagttattttgtaagactaaatactatcccattgtaagtacatgcataccacgttttctttatccatttagccatcagtggacatttggattgatccatctcttggctattgtgaacagtggttttcaaatatttcttcaaagatccaactttcaatttatatgaattgaatataaatagacccagaaatgggttgctggaagaaaattttttttttttttgctagtttttcaggcaccaccatactgttttccataaagattgagccattttgcaatcctttggtcagagcacatgggttccaatttctcaacgttttttccaaactttatatttgaggtggtttgatttttcttttttctttttctttttttttgagataaagtctcagtgttgttgcccaggctgaagtgcaatggcgcgatctacgctcactgcaacctccgcctcccagcttcaagcaattctctggccccagcctcctgagtagctaggattacaggcacccaccaccatgcctggctaattttttgtatttttagtagagacagggtttcaccatgttgaccaggctggtcttgagctcctgacctcaggtgatccacccacctcggcctcccaaagtgctgggattacaggcatgagccaccgcgcctggccttgatttttcttttctttttagttgaatgtaagaattcattatattttctgaatattgagacttttccagatatatgactttccaatatttgctccagcatcatggggtgccttttccatctgtttatggtgtcccctcatagacagaacttttaaattttgataaatatttgcctttttgttaagagtgggtgcactggagtttttatccctgaactttgtctccattcagccttcagcatttcatcaattacaatttaagttttcctaccacagtctgctttttttttttgagacagagtttcgcttttgttgcccaggctggagtgcaatggtgcgatctcagctcaccgcaacctccgcctgccaggttaaagcaattctcctgcctcagcctcccgagtacctgggattacaggcatacaccaccacgcccagctaattttgtatttttagtagagacagggtttctccatgttgaggctggtctcgaactcctgatctcaagcgatccgcacgcctcagccttccaaagtcctgggattacaggtgtgagccaccgcgcccggcccacagtactgtttttcacaaaatttctattcatgagttttttatttagatagttctgcctctcttatcagttgggttggttgaaccccttgcaaaatccagttttttttttttgcttttgttgtctgctgcttcaatcagaataaaatcccccttccaggtaatcttcaatggttaaactttgtgaacaggcattttcaaggatatatagcctcaggactgctaatgttaacattttctgcaggtgaatttagaggactgtgttatgacaggtgctatagacccatgctacaaacagacattaagagcagcccaggcagcgcacctttctccctggattccatgaaaagacacatttttctattctgctgttcgtttattgcttagttctgttccagcatcagaattgctttagagaagaaagtaagtgtagacagagagtaatgggtcagatgaccaagaaatagaataaatgtttggagtccacagcatcatgggaacttcttaggaagagggtatagacccccagtgctgtcagtctcacccatcctcctctatacatgtgggatgtttcaggacttggtggctttcgaggatgtggctgtgaacttcacccaggaggagtggtctttgctggatccttcccagaagaatctctacagagaagtgatgcaggaaaccttgaggaatctggcctccataggtaagaatgacagtattacgtcccccagtgaatgagacaagtgtttctagctcattaatgctattccttgatttggaatatggacaggcaatactttgatgaataaatgaggtatggctctaatgtcccgtgaacatagaatctaatcattttttcataattttattttaattcaggattctttttctgattctgtattttaggagaaaaatggaaagaccagaacattgaagatcagtacaaaaatcccaggaataatctaaggtgatttaaactcacgagacaaagcaatgtctctctagaaaatctcagaatgcgagaatatgttaagaagaagcaaataaaggaaatatgcctagcattaaatttatttactcttaaaatattcactctaaaaacctacatttaaatgtgatctaggctgggcacagtggctcacacctgtaatttcaactgtttgggagttggaggtgggaggattgctagaggcctggagtttgagaagagcctgagcaaaatggcgagacttcatctcaaacaaagaactagctatacattgtggcatatacctgtagtcctagctacatcgaaggctgaggcaggaagatcacttgagtccaggagttcaagggtgctgtgaaccatgatgatgccactgcactccagcctgggctatatggtgaccctgactcaagaaaatgatatagaagtttagtatttgtaaaatagtctacatggaaatattatgaagaattctcatatggtgtttttcttttttaaacatatgatttttaaaaataatacgtatagataggccatcttatagccatatggtccagtcaccttccaacaatttagacagggtagaaagcctacactttcctggataatgttgaaagtgcaagttcagtggggagggatagcattaggagatatacctaatgctaaatgacgagttaatgggtgcagcacaccaaatgggacatgtatacatatgtaacaaacctgcacgttgtgcacatgtaccctaaaacttaaagtatattaataataaaataaaataaaataaaataaaatgcaagtgtaatccttgttaataaacatcaaatcacttataaacaaaccttcaataatgtgtttctcatttttcacagaagtcttctgggagagagagttgatgaaaatacagaagaaaatcattgtggagaaacttctagccagattccagatgacacactgaacaaaaaaacttctcctggagtaaaatcatgtgaaagcagtgtgtgtggagaagtcttcgtgggtcattcttcccttaataggcacattagagctgacactgcacacaagccgtctgagtatcaggaatatggacaggagccatataagtgtcaacaacgtaagaaagccttcagatgtcacccctcctttcaaatgcaagaaaaggctcacactggagaaaaactctatgattgtaaagaatgtggaaaaaccttcatatcccattcaagcattcaaagacacatgataatgcacaatggagatggaacttataaatgtaagttttgtgggaaagcctgcccttgtctcagcatatatcttatacatgaacgagttcacactggagagaaaccatataaatgtaaacaatgtggtaaagcctttagttattcaacttcccttcaaatacatgaaagaactcacactggagagaagccttatgaatgtaaggaatgtgggaaagcattcggtagtcccaattccctttatgaacatagaagaactcacactggagagaagccatatgaatgcaaacaatgtggaaaagccttcagatggttccattcctttcaaatacatgaaagaactcacagtgaggagaaggcttatgaatgtaccaaatgtgggaaagcattcaagtgtcccagttatctttgtagacatgaagtgacccactctgggaaaaagccctgtgaatgtaaacaatgtgggaaagcattatcttatcttaactttcaaagacacatgaaaatgcacactagaatgagaccttataaatgtaagactgtggaaaagcctttgattctcccagttcgttttgaagacatgaaagaactcacactggagagaaaccttatgaatgcaagcactgtggtaaagccttcaatcgttccagttcctttcactatcatgaaaggactcacactggagagaaaccctatgaatgtaagcagtgtagtaaagccttcatttcttccacttcctttcgatatcatgaaaggactcacactggagagaaaccgtatgagtgtaagcaatgtgggaaagccttcagatctgcctcacaccttcaaatgcatggaaggactcacactcaagagaaaccctatgaatgtaagcagtgtggtaaagccttcattttttccacttcctttcgatatcatgaaaggactcacactggagagaaaccctatgagtgtaagcaatgtgggaaagccttcacatctgcctcacaccttcaaatgcatgaaaggactcacactggaaagcaactgtatgaatctaaacaatgtgaaaaaacctttggatctgtcagaaaccttcaaattcatgaaaagacacaccctggagagaaaccctataaggaatatggaaaagcattcaacaatttctcttcctttcaaatacatgcaacaatgcacagaggacagaatgcctatgaatgtaaagagtgtgacaaagcattcatatctgccaagatccttcgagtacatgcaagaacacaccctggagagaaaccctatgaatgtaaggaatgcggaaaagcgttcaattatttttcttctttgcgtatacacaaaaggatgcacactggagagaaaccatattaatgtaaggattgtgggaaagcattcagtttgcctggttcctttcgtagacataaaagggctcacactggagtgaaaccgtatgaatgcaaggaatgtggcaaagccttcacttcttctggttcctttcagtgtcataaaaggattcacactggagagaaaccctatgagtgtaagcagtgtggtaaagccttcatttcttccactgccattcgtagacatgaaaggactcacactggagagaaaccctatgagtgtaagcaatgtggaaaagcctttatttctttcagttccattcagtaccatgaaaggactcacactggagagaaacagtatgagtgtaagcagtgtggtaaagccttcatgtcttctactgcatttcagtatcatgaaaagacccacaccagagagaaacactatgaatgtaagcagtgtgggaaagccttcatttcttccggtagccttcgatatcatgaaaggactcacactggagagaaaccctatgaatgtaagcagtgtggtaaagccttcagatctgccactcaacttcagatgcatagaaagattcacactggcgagaaaccctatgaatgtaagcaatgtgggaaagcctacagatctgtctcacaacttctggtgcatgaaaggactcacactgtagagcaaccctatgaatataagcaatatgggaaagccttcagatttgctaagaaccttcaaatacagacaatgaatgtaaacaattaaatgtttatagcagctgcatactaacatgttattctgtattttttttttctttttgagacagagtctcgctctgtcacccaggctggagtgcagtggcgtgatctcagctcactgcaagctccacctcctgggttcacgccattctcctgcctcagtctcctgagtagctgggactacaggtgcctgccaccacacccggctgattttttgtattttttagtagagacggagtttcatcgtgttagccaggatggtctcaatctcctgacctcgtgatctgcccgcctcagtctcccaaagtgctgggattacaggtatgagccaccgtgcccggccgttattctctattttttgttgttgtttgagatgagtcttgttctgttgcccaggctggagtgcagtggcatgatctcgcctccgggttcaagcaattctcctgcctcaggctcctgaggaaaaagattcctaggattacaggtgtgcaccaccacacttggctaatttttatatttttagtagagatgaggtctcaccctattggccacactggtcttgaactcctgacctgaagtgatccacctgccttagcctcccaaagtgctgggatgacaggcatgagccactgcacccagctgttattctctatttaattaattgagaagccataataaaatatctcagtgccatcatgcattagatcaagtttatgttaccacattattttttggacattgtgagtcaatattaccaagtggacaaaatcccaggcatctttttcctcatgtaaattttaattttcatgcttatatacttagaacatttatcttggtcctaattttttgttcattcataataccaaaagttatctcatgttcttcagagtgactttgtgccatatcccacagtggcatacctgtcttcaaagagggtataattcacaaaaggacttacactagaggaaaaccctatgaatgtaagctgcgtgggaaagcattttctgatctgagtggcattgaaacccacatggtattgcacatgacagataggcctctctccccgttcatttctttttttttgagacggagtcttgctctgtcgctgaggctgagaacagtggttccatctctgttcactgccacctccacctcctgggttcaagtgattctcctgccccagcctcccaagtagctgggattacaggtgaccgccaccacgcccagctaatttttgtatttttagtagagacggggcttcactatgttggccaggttcgtctcgaactcctgacctcaggtgatccacctgcctcagcctcccaaagtgctgtgcatacaggcatgagccactgcacccggccttctccccattcattttcaaagacataaaaggatgcacaataaagagagaccctctgaatgcaagcaatatggaaaagcattccattgtatcagatccttttgtagccatgaaagaactcgctgaagagaaaccctgtaaatgaagggaatgtgaaaagccttcattcctgaaatgaagcaattcatactattaatatatgagagaaatcctattataagaaattgattgctgtgcacggtagcttacctgtaattccagcacttccagaggctaaggcaggtggatcacttgaggtcaggagttcaataccagcctgggcaacatagtgaaaccctgtctctaccaaaaatacaaaaattagccaggcatggtggcgcgtgcctgtagtcccagctactcaggaggctgaggcaggagaatcacttgaacccaggagctggatgttgcagtgacccgagattacgccactgtaccccagcagagtgagactccatctgaaaaaaaaagcaaggggccggcacggtggttcacgcctgtaatcccagcactttgggagaccaaggcaggcagatcacctgaggtcaggagttcgagaccagcctggctaacatggcaaaaccccatcgctactaaaaatacaaaaaattagatgggcatggtggcacatgcctgtaatcccagctacatgggagactgaggcaggagaattgcttgaacctgggaggcggaggttgcagtgagccaagatcacagcattgcacttcagcctgggcaacaagagtgaaactccatctcaaaaaaaaaaaaaaaaaaaattgaggaagcattcagttgtcccacttcctttcaaacaggaagagacactagagagaaaccctctgagataactgactgttgaattaagaagagaggcctggccggacacagtggctcacgcctgtaatcccagcactttgggaggctgaggtgggcggatcacgaggtcaggagatcaagaccatcctggctgacacggtgaaaccccgtctctactaaaaaatacaaaaaaactagctgggcgtggtggtgggcgcctgtagtcccagctactcgggaggctgaagcaggagaatggcgtgaatccaggaggcagagcttgcagtgaaccgagatcgcgccactgcactccagcggcgacagagcaagactccgtctcaaaaaaaaaaaaaaaaaaaagagaagtctgacaggacaataaaatttagaaatggagttggaggatgtcataatacaattcaccagtgtcctatcttacatgcaatttcaaaggcagacaagaggaagtcatcagtcacattttagaggcaccaaacaggtgccacatccatacaggctgactccctgctcccagcccattttttcctgaatctttggcttgccaatcaagaatgtcctcaaaatttgctcagaggtgtgggcctttgggtaaaggtgtcttcagaagctccacattaaagatccatcagtggttaagggcaaattgaagagaaataaagactaagatatttttttaaaagactgaaagaatagaacaatgaaaaagccccatctgtaatacagtttttctttttctttttttttgagacaaggtctctctctgtcacccaggctggagtagagtggcattatcctggctcattgcaatctgggcctcctggtttcaagtgattctggtgtctcagccacctgagtagtcaggattacaggtgcacaccaccacgcatggctaaatttttgtatttttagtagagatggggtttcaccatgttgagcaagctggtcttaaactcctgacctcaagtgatccgtctgtcttggcctttcaaaatgctgggattataggcgtgatccactgtgcctggcctggtgtttctttaggtataatgtctttaccagagagctaatgcagactgtcatgggtgagattgttctctgatgttcaattcccctactttgtatattgagtcagtatgagatgcgatttgtttggcaagcacctttgttcctgctgttactgacccttatcttgtagcctcacagctactatgcttttgtccagtccaactagataggagcttcttcctctgctgcagtgactggtctcacccagggctttcaggaaggtgagaataagcaccttcctcctcccaggaagttttgagtttcctgtgtttcatttctgaatgtaatgtctccatttattttcaattatgtttgattatatttgattaaaaacaataatttttttggcaaccaagatttctgtacatgtgtcatagaaatagttgaacttttccacaactgtatactgacaaacattattctttcttaattaattcagtagctatattaaaatatgtattagatcaagttcataatgttgccaagttattggttggacattgtgagtcaatattaccatgtgaatagaatgccaggcatgctttttctcatgtaaaaaaattttactttttatactcacttatatccttaaatttttttgttgtttgtttgtttgttttttttgagacggagtctcactctgtcgcccaggctggagtgcagtggcatgatctcggctcactgcaagctctgcctcccgggttcacgccattctcctgcctcagcctcccaagtagctgggactacagttgcctgccaccacgcccggctaatttttttgtatattttttttagtagagacagggtttcaccgtgttagccaggaaggtctcaatctcctgaccttgtgatccacccacctcgccctcccaaagtgctgggattacaggcgtgagctaccgcgcctggctatccttaaattttttatcttagtcctaacttttctttttttctttttctttttctttttttttttttttgagacgcagtctcgctctgtcgcgcaggcttgagtgcagtggtgcgatctccactcactgcaacctctgcctcctgggttcaagcgattctcctgcctcagcctcccaagtagctggggtgacaggcgccggtcaccacacccggctaatttttgtatttttagtagagatggggtttcaccatgttggtcaggctggtttagaattcttgaccttgtgacccacctgccttagcctcccaaagtgctgggattacatgggtaagccaccacgcccagcctcttagtcctaacttttcattcattcattgtaccaaaagttaactcaatgttctcagtgacgtcttgccaaagaccaccagtaccatacttgttgtcaaagagggtgtaatatagtaataaatatgatcaaaagccataaatgacagtgagatatatgagaattacaaatgagtcacattactgaaaaaaatttgctcagtttgataatttgaaatatgttttcttctatactattttgagacatggttacagagtgtccttgttttgtcttgatccgtcatggtcactgaagagcattgtctcacattgcaggtgtatgacatgtgtctttccaatggcataagacttggccttgtggccgggcgtggtggctcatgcctataatcccagcactttggaaggctgaggcgggtggatcacctgaggttgggagttcgagaccagtctgaccaacatggaaaaaccccgtctctactgaaaacgcaaaaattagtcgggtatagtggcacatgcctgtaatcccagctacttgggaggctgaggcagaagaatcacttgaacccaagaggtggaggttgcagtgaactgaggtcacgccattgcactccagactgggtaacaagagcaaaacaccgtctcaaaaagcaaacaaagaaaagacttggccttgtggtgagaggaggtagctcctggacttctagacccatttttgccttatcttttttttttttttttttgaactactgagcagctgggattacaggcactcgccactacacccagctaacttttatatttttagtaaagacagggtttcactatgttggtcaggctggtcttagactcctgacctcaggtaatccactcacctcagcctcccgaagtggtgggattacaggcgtgagccaccacgcctggccaaaaaatatgcatattttaaatatgcatattttatttttgtattttttcatgaaggaaggtcaaataacaaaacaggaaaaatcctttttaagataagtgaactttaaattttcctcaaaaaaacttataattcacacctgacccaacatttcatcatccagtttttgttttgttttgtttttttgagatggagtttcgcttttgttgcccaggctggagtgcaatgccacgatgttggctcaccacaacctccacctcccacgttcaagcgattctcttgcatcagcctcctgagtagctgggataacatgtctgtaccaccacacctggctaattttgtatttttagtagagatgaggtttcaccatgttggtcaggctggtctcaaattcccaacctcaagtaatccgcccacttcagcctcccaaagtgctgggattacaggcatgagccatcgtgcccagcctatcatccagtttgtttgcagtatcacaatgttttattcagaaacatttactaaatttgggccagacacggtggttgttcaggctagggtataatggtgggatcatagctcactgcatccttaactcttgggctcaagtgattctctcgcctcagcctccaacatatgtgggactacaagcatacaccaccatgcccaggtaactgttttgtttttttttttaagatggagtctacactggcacagtctctgctcactgcaacctccaccttctggattcaagcgattctcctgcctcagcctcccaagtagctgggattacaggaagctgccacgccaccatgcctggctcatttttgtatttttagtagagatgaggtttcaccatgttggccaggatggtctcaaactcctagcttcaagtgatccatccacctcggcctcccaaattactgggattacaggcgtgagccaccatgtcctgccagattttaaaaattttctgtggagatgtgatctaactgtggtcccaggctgctctttaacttttagcctcaagcaggtctcctccctcagcctcacagtgctaggattataggcttgagccatttcaaacagccaaatttaacttttattgtggtgttgaaaggaattttgtatgtactttcttctttttttctttttttttttttttgagacggagtctggctctctcacccaggctatagtgcagtggtaagatcttggctcactgcagcctccatctcccaggttcatgtgattctcctgcctcagcctcccaagtagctgggatacaggtggccaacacgacacctggctaatttttctatttttagtaaagacatggtttcaccatgttggccaggctggtctcgaactcctgacctcaagtgatacacccatctgggcttcacaaattgttgggattactggcataagccaccacacctggcatttgtatatgcctttcttgtattactttgaccatggtaggacatatacaataggcaaatgatataaaaggccaaggcgggcagatcacaaggtcaggagttcgagaccagcctggccaatatggtgaaaccccgtctctactaaagatacaaaattagccgggcgtggtggtgggcgcctgtaatcccagctactcgggaggctgaagcaggagaaacccttgaacctgggaggtagaggttgcagtgagccaagatcatgccggtgcactccagcttgggagacagagcgagactccatctaaaaaaaaaaaaaggttaaatttaatttttgacaatcactttaacacacaacttaggtttatatggaaagagaactatgaccacttgtgaacaagtaactggtaagtaagatggaattatggcttctgtgtgatactctattgttaggcaagcacaagctccttataaaagccctcatatatgtaaatgcatcaaatatcatgtgactacttggtttcctaaggacagtttattattcctttatcccagtataattttgcatagtcatcactctctttgttatgggtatctatacttaaagaataaatatatatgagttatctacacatgagctaaatgaggttttgtaaattgaatgatatttttaggaaagtgttggactttgtcaattaccatgcctgatatcaatgtgtcttacctgactatatcactcctaaaaatttcactgcgggccgtggtccctggatttcctgagggttgattgcccatccccattcctgtagacgagcacacaatggtataagactttcctgtaacacattacagtcttcagaggttaacgtgatgtcatcaatataatgaaaccagggccaggtcagatggctcatgcctgtagtcccagtgactcaagaggctgatgcatgagaatcacttcagcccaggtgttcaaggctgtagcgaggtatgactgcatcactgcactctagcctgagtgacacagcaagacccaccctgtcaaaataaattagatagatagataaaataataaataatgaaataaaaaaatatataaaattaaaccatgaaagatgacaggaatgggaacaaagacaagcctctagccaacattctgtgacaaatcctaggactttggagataaccctggagcaacccttgaatggcagccgactcaccagggcatctttctggacttccatggattaaaacacactccaccatagcatctactaatgtgacagtcttctctctattttgggggaccagtaagtggagagctgaacatgaacccttttattccagtagcagcctggcagggtaaaagcaaattggtcttgtgattatttagagagaggaatgctgaaaaaaacattagctaaatctaacgcactgtgatgcatccccagcagggacactatgtgatcagctacctgagtaataggaactacaggatgtatggttgggggttaccttggtcaattcctggtaatctgcagtcatccaccaggtactgtttggtttgtgttcaggccagagagactgttaaaatgagtttgagctgggtggataatgtgtccacttaccagtgcctcaatagttgcacttatttctttttttttttgagacggagtctcattctgtcgcccaggctggcgtgcagtggtgtgatcccggctcactgcaagctccacctcccgggttcacgccattctcctgcctcaccctcccgagtagcggggactacatgcgcccaccaccgcacgtggctaatttttttttttttttttttgtatttttagtagagacggggtttcaccgtgttagccaggatggtctcgatctcctgacctcgtgattcacccacctcggcctcccaaagtgctgggattacaggtgtgagccaccacacccggcctagttgtacttatttcatcatgtcctccacagcccccccgcccaaaataatttgtactattatttatttatttatttatttatttatttatttttgagatggaatcttgctctgtcgcccagactggagtgcagtggtggtatctcggctcactgcaatctcctcctcccaggttcaagctatccgcctcctgggttcaagctatcagcctcccgagtacctgggactacagatgtgcgccaccacacccagctaatttttgtatttttagtagagatggggttttgccatgttggccaggctggtctcgaactcctgacctcaggcaatccacccacctcagcatcccaaagtgctgggattacaggcgtgagtcactgagcccagcctaataatttgtactctttaaacttgacaactcgcctaggagcagaaagctgttcaggttcccattttgcctgtccttgagaacagcctttactacagcacgttcaagctgaattctcccactcaagtttgcgaagtctttcctaacagaatatccatgcctaaaatgttttctaaaataggggtaataaatgccatatatgggttggggagcttcccaatacctagatgtattaaagtcctttttatctgagtcatttgtcctctataatcatcagtgtcaggccactgttcaggatttgtttctggatttccagagatgaaagtacattccaccctgtaataggattacagactattactaaggtaataatctttttatttgggggggcaacaagaaatggtgagcttgatatgggacctctggtttccacctattgcttgaacatggggttgaccttgccccagtcctaatctctgagctatggtggaatccactcctggtagagtgggacgatcaaatgaaagattgagtcatcttcctattcttccatagaggcagaagggaagggatgaaactgcagtttaggctgtagtttctaccataagggtactaataaagtcttaggttgtttgtctgtttctcttcagggtgtttctgcccccaacaaattatgccacatttgctcatgggtgactcctattggtccctttccctatctccccttttctttctgttgatttttcttttttccctttgttagcccttgttggattaccgagtttaccctgttcctgagtttctaaatttctccaaatctgcagtgcttctcccacatcatatacacattgtcccactataggactcgagaaagatagcaaagggccatgccattcctctggtgcaccctgtagcattttttaaatctgggcagtacaaactgctttactggtcccatggaaagccactcctagatggcttgcctccttcctcaacctccaagaagccccagggttacagaatcaccaggttcatatgcacactgtgcagtaacagaccaatacactgagacagcaagatttgcagcacagaaagagtttaatgatcatggggtgacccagcaagcagatgagaggggccctcaaatccaactcctcaaaaagttctgggctggattttttgttttttggactagtcaattgaagcagtgggaatggaggagaaacaaagacatctgtaactggttgtgatcaattagttgtaaacaccactgcacttggacccacactaggctgggatttttaaggggattgtggcatgcaagaggctgaaaaattgaggtggttgattgaagtacaggcaatgaaatcatcaggatgtgaaaactaccttctttggtgagtcagctactactggggtccttcagagcagctgaagtcagtagtttcactgttatgcaggacctgaaataatatctcaaagggaaaaattaacattttttaatgttcaagtttttatctatagagcagttaaggggaattatcatctagggtttacaggattctaggacgctaggcatcaaacaactatgaagggggccaggcatgggggctcatgcctgtaatcccagtactttgggaggctgaggcaagcgaattgcttgatcccaggagtttgagactattctgggtaacatagtgagaccccatctctatttcaaaaaaataaaaaaaaaatttggcgggggggtcagagagcaagctgacctaataattaatgctgaatgtgcagcaagctttgtttatttcaattttctccctccctccatcattgattaatttgacaaaatttaaagggatggcttcatcagcatttcttccgttgactgctaggacgtcatctcttctggtaaatcttcagcaggccaagcatctcttatgggtagaatgatctagtccataagggaataccatcacactgtgtcccacaattggatgatccaagtggtcccgggaatccccaggtaggatggtttcatttcttttttttttttttttgagacagtgtttcactctgttgtccagcctggagtgcaatggtgccatctcagctcactgtaacctccaccgcctcctgggttcaagtgattctcctgcctcagcctcccaagtagctgggattacaggtgcccaccaccatgtccagctaattttttgtatttttagtagagatggggtttcaccatgttggccaggctggtcttgaactcctgacctcaggtgatccacccgcctcggcctcccaaagtgctgggattacaggtgtgagccactgcgcccggcctttttttttttttttttgagacagagtcttgctccgtctcccaggctggagtgcagtggcgcagtctcggctcactgtaacctccacctcccaggttcaagcgattctactgcctcagcctctggagtagctgggactacaggcgcctaccaccacacccggctaattttttgtatttttagtagagacggggtttcactgtgttagccaggatgggctcaatctcctgacctcgtgatccatccaccttggccttccaaagtgctgggattacaggtgtgagccacgcccggcttggtttcattttgtggcccaggctggagtacagtggcctgatcctagctctctgcagcctcggactactgggttcaagtgatcctcccactgcagcctcttgagtagcttgggactacaggcacaggccaccttgccaggctaatttctctctctctctttttttttttttttgagatggagttgcgctcttgttgcccaggctgaagtgcaatggcacgacctcagctcacagaaatctccgcctcccagattcaagagattctcctccctcagcctcccgagtagctggcattacaggtatgtgccactatgcctggctaattttgtatttttagtagagacggggtttctccatgtttgtcacactggtctggaactcccgacctcaggtgatccgcctgcctcagcctcccaaagtgctgtgattacaggcatgagccaccgcgcccgaccttctttttgtttgtttgtttgtttgtttatagagacagggtctcactcttttgcccaggctggtcttgctctggtcaggctgtctccaactcccagcttcaagcgatccgctccccttggcctcccaaacttctgggattacagatgtgagccatggcaactggccttccaggtatttattgaaaggttttgcaacctctgattgttctgcagcagtatattacctgacaatgagagtcccctgcatcctttcaccccatgttgcagaagttgctgcgctttccccttttgtttgcatagtgggacaagcatgtcaatgatcctcatcctcctcttcatcaatgacttctttgtcatcagtcttcctcttcataaattgccaaggaatccaagttctcacatctcaatcgggcttacttatgatagtagcagctgtcataagtctgcatcagctcccacagctccaggctccatcaagcctgactcctttttcttccccacagtcatttcccagaagcccccagctctgcttgccaggtgccttaggctgtacagctgcactgctgctgagtccaggcagctatctgtccctgcagccccttccccaacccattcccagcccagccccactccaccactggtatctctagtgtccctgactgctagtgcctcagccaccgccgccactgcgatttggaagtcttttaatgcagttaaattatcttagttttttctctcccagtttatatgtacatacagaaggaaagcagggattctgctagtgtcttattcacacagtgagattgtagatgttggtctggtggacgtgatcagtgggggagagaagtaggtgaataacctgcagggggcagcagagcccaagaccagcctggagcctgcaaagggaaggaaaatgagctcccttgggtgtttctgagcagctccaggagtggattctgagaagctgcagagccctggaacacaggagacccaagtgcagatgcatttggggtggcggacagggggcatgcagagggggaggtgttctgtcatgtctgaggttggacctcaggagcctggggccatttggagggcagtgtttttggttttggcatgcatagggtcactgggttcaggcggtaatttgtatatatgaagaaaatctgtgaaggtcagtgtgcgagaattgtttggaacatcacctggtgaaagggtttacgaagttgacagtttatttaggttagaagcttaaactgactccaagggatagtctcctgctgttgaaaatgaagttctggaaggagggagtgttcccatactgtgaggagagatggtagatgtgtgaggaagctttgtccatgcctcatcccctactcctgtccccctggaggacatctgtctctctttcctggtctagtcgtgcctggcctggtctcggttcccctcctgctctgaggcaaacagatcgccccagcagacactgagtctggaatttcctgcatacacttgtgacctgatgcaggaggaaggagcagagaaagcccattgagtgaaggagaggtcagtgccctttctaaagttcaggaaagaggccaggcgcggcggctcacgtaatcccagcactttgggaggccgaggcgggcggatcacctgaggtcaggagttcgagaccagcctgactaacatggtgaaaccctgtctctactaaaaataacaaaaattagctgggcgtggtggcaggtgcctgtaatcccagctactcaggaggctgaggcaggaaaatcgcttgaacccgggagacagaggttgcagtgggccgagatcgcgccattgcaccttcagcctgggcgacaagagcgaaactccgtctcaattagttaatcaatcaaccaatcaatcatatatatatatgaagttcaagaaagtttggcggaaatgcagatatccaaggatcagggcacagggagggaggtgggccttaaagaggaagtgaatagaaccagtctggctctgcagggccccgttatcccgggcttctgctgtcactcagggctctgaaggcgaggcggggagcacggtccaatcaggagcgccggggcggggccctgccaacttttttcggggaaggagacggctgcaagcccgcggtctcttgttgctgtgctaacgaccgttggaaccctctttctggctcttggaacgctcggctctgagaggctccaggtttctccgccagagctcctgtcgctctgtcagttgcgctgtgttcctctctagtcacaagagccttggggaagacagttggaagctcagacatggtgagtgtgtggggccaggcgtcctgagacgggggcgaagggcttcttagaacctgctggaaccggctgtggcgggacccgggcctccccgcggcgactccggggtctgtggggctgggccggcagccgggacccggggcatcctgtctcgtcccttcgcagcgaccgcggccccggacccggagccctctttgggcagctccgcgtcttcagccgcgggtctcctcagattgtgctgggccatgaggaggatcatggggggaatcccgtctcgggtgtagggttcttgcgtcagaaaagcggtggtctgtggagtccccagtcgtcttttctcctcttaaaagttaaaatggccgggcgcggtggctcacctgaggtcaggagttcgagaccaacctaacatggagaaaccccgtctctactaaaaatacaaaattagcctggcgtggtggcgcgtgcttgtaatcccagctactcgggagactgaggcaggagaatcgcttgaaccctggaggcggaggttgcggtgagccgagatcccgccgttgcactccagcctgggcaacaagagtaaaactccgtctaaaaaaaaaaaaaaaaaaagaggcactgataaaaattcaagagtttgtgcaaatgggaattcatgaatgagaatcacgcagtcatggtttgtggtttgttaccagaaacatttggaaatattgcagttgagttggatttcagtgcccttaggtaggaccttagtgcactacacacacttcagtctgtttacttgtttaaattttttcacgctgtccacatggactggtttctccctccattttccaaatctgtgggatacagggtctcacaccctccccgctatgaccccagcctaactctttaaaggcttgcggtagcatcttacattttcagttcccttcccacatttccaaacattaactcctcttctccaattcacagtattttcaactatttgtacttttttttttttttaaagatggagtctcactctgtcacccaggctggagtgcaatggtgtgatctcggtcgccgcaacctccgccttccgggttcaagcgattctcttgcttcagcctcccagagtagctgggattaaaggcgtccaccactatgcccggttaatttttgtatttttagtagagacagggtttcaccaggttggccaggctggtctcaaactcctgaccccaagtgatccacccgcctcggcttcccaaagtgctgggattacaggcgggagccagcgtgtccggcctatttgttctttattgtacaatatattcatcctttccttcaaatagatgaagtattttaatggtgtttttttttttttaacagagaaatatgattccacaggacaatgaaaacccaccccaacagggtgaagcaaatcaaaatgtatgtggggtacacagtgcagtggggaatgacacaatacagtgttgatgagaaactgtcattgagcacatcagtgagcaggatagcagtggggttttgacaacacaaatgtcatatacccaccagttttgtttttggttttgtttgtttttggttttgttttgagacaggatttcgctcttgttgcccaggctggagtacagtggctcgatctcggcccacagctgcctctgcttcctgggttcaagcaattcttctgcctcagcctcctgagtagctgtggttacaggtgcgcgctaccattgccagctgatttttgtatttttagtagagatggggtttcaccatgttggccgggcttgtttcgaactcttgacctcagatgctccacctgccttggcctcccagagtgctggaattacaggtgtgaaccaccacacctggcccaccagtcttatttatttatttatttatttattttttgagatggagtctcactctgttgcccaggctggagtgcaatggcgtgatcttggctcactgcaatctccgtctcccgggttcaagtgattctcctgccttagcctcccaagtagctgggattgcaggtgcctgcgaccacgcctggataattttgtattttagtagagttggggtttcaccacgttggtcaggctggtcttgaactcccgacctcaggtgatctacccgccttgacctcccaaagtgctgggattacaggcgcgaaccactgcgcccagtctatacctgccagtcttacacagaagagtttcactgccctaaaaatcctttgtgctttgtgtagccatcacactcccctccctctcttccactaaccccttaatccctggcacaaccgatgattttattgcctttagagttttgccttgtccagaatgtcatgtacttggaatcatgttgtaagtagccatttcggcctgtttgtttcacgtaaaaatacgcatttaaagtatctttgtgtctatgtggcttgataacagatttattatttctttattttacaaaattttaaagagatggggtctcactatgttgcccaatgtggttggcggatcacgaagtcagaagttcgagaccagcctggccaacatagtgaaaccccgtctctataaaaatacaaaaaaattagctgggcatggtggcaggcacctctaatcccacctactcaggaggctgaggcaggagaatcgcttgaacccgggaggcggaggttgcagtgagctgagatcgctccattgtactccagcctgggtgacaagagtgaaactccatttcaaaaaaataaataaaaaataaaataaaaaataaaaattacatttggccaggcatggtgactcattcctgtgatctcagcactttgggatttaccctatacctatttgggcacacaaatcctgtaactgggggtaacccccttagggagtgaggagaatcatggaagttaggagtggtcatttattacatatgtggataataataatgttttgtgtatattaggttaaatagtataaacattgtaattgctagatttacataaattgataggttaggattgtgaaagaaggattagatgttaaaattgtgattattcaatttgttgtgagcaattgccaaataggccaagatatttcacagctgtgtttggttaaggtccccttaaccaatctcccatagtgttgcaatctcccatagtatgtttaagtctgttgatgagtagacttgaaataaaatggagatcagtgctagtttttgtcatgtaagtagaattacacttgatattagtgagaccccttgcattacttcagaagtgaaagggggatagtcctaattttatcaccagtgctgtgataattataagggatgctatttggtttagggcttttgtgattgttcattgtctggagtatatcatattgttgatgatagctactaggatctactagtattagagatgcagttgcttatgtaaggaaatactttggtggtggcttctgtggagcaggcactttttcagttagaatggggataatggctagcatatatctaacctcattcagattaggagccagtgtaagtccattattataatcagagtctctgtgaaaataatataaagagaatagtgaggagatgtaggggatgaatttgaataggaaggatataaacattttcaaggtatgggctgggtagcttatttagcttaccctactgtaggatatggtgtcctaggtaccatggagaatctggaattctcaggagtgggttcagttcctacagttctagtaataagagggtttaaacctctataatttattatattaaagtaaccattctatcatacatattttttatgtttgtggtgggatactagatattaggatgggcattgagatatatgcacaggactcatgtctggggtaaacagttttttcacagaagatgcttaagttgggcatttggtcggtggggacccacgcgggttcaacatgcatatcgagaagtgttatttctgtttggggcccatctaccctggccatggcattatgttcttctgcaacaattgcaaggtgttcagattttgtaaatctaaatgtcataaaaactttaaaaagaagtgcaatcctcacaaggttaggtggacgaaagcattccagaaagcaactagtaaagagcttacagtggacaattcatttgaatttgaaaaacatagaaatgaacttatcaaatatcagcaagagctatggaataaaactattgatgcaatgaagagagttgaagagatcaaacagaaatggcaagctaaatttataatgaacggattgaagaaaaataaagagctacagaaagttcaggatatcaaagaagtcaagcaaaacatccatcttatcctagccccttttgcaggcaaagagaagcagttggaagagaaaatggtatagcatttacaacaggatgtggacatggaaggtgcttcttaaaaatctctgtaaccatttctttatgtacatttgaaaaagccccttggagaattagaactgctaaattcttagtttattttttacataaggtcactcaaatgaaaagtaattaaaatatatttttcctacattactgtctacaagacatcagatattacggatgttagattgcatctcagtgttaaattttcactgacagatgtacttatgtaaaaatcatgaaaattctgcttataactatagaagtgaattgtggatttaaatggttatgctgtttggataatggcacgcggcgcatttctgtaataactgatggcaaaaattcatggctagtgatgtacaaaataaaatattagttagagtaaaataattcacttaaagttatagaaggggaatacaacaaggaactaacaattgtatgacagtgtcaaatattattttgattttagtatttactgttttggtttatttgcatcttagaagagcataatggcattgtttgatgaagcctcattatgctggactgttttgacctgtttaattgttctgataggtagttgtagatattggggatgagaactgaacaatctttgcctgaaatggcactgctctctagaatttccactttggagaatactcagaacttgtgattcctggtagaacaactttttttctagactagcaactatctagaagcagaggaatctcattgccttttaaaatctattatgtggttttcttttaaaaagctcttgtttttggaaagtagaatttaggggaaaacatctgttcattatttgcatgtaaaaccagtttaaaagtaagaaaaaaaagaacatgcataagttgatcataccaaaatcatgggtatgatacctgaaacctgaattcataagaataaaattgttttttactttctttctttttttttttttttttagttggagtcttgctctgtcacccaggctggagtgcagtggcgcaatctcagcttacggcaagctccgcctcccgggttcatgccattctcctgcctcagcctcccgagtagctaggactacaggcgcccgccaccacacccggctaatttttgtatttttagtagagacaaggtttcaccgtgttagccaggatggtctcgatctcttgacctcgtgatctgcccacctcggtctcccaaagtgctgggatgacaggcgtgagccaccatgtccagctgtaacttagaactatttaaagaggcaaaggcataggagaataaaggaaggaagaagtaactcgtggaatgttgcgaaaggaaaaacacgtttaaggaagaggaacaggctatgacttaatgtttgcttggaccagtataagcatgccagggcaagtatttaggctaacttgtgggagttaagaatataaagttgccaagaccagcttggctggggagacgctaacccagcagcgctagaggaattaaagacaccacacacaccaaaatatagaggtgtgaagggggaaatcaggggtctcacagccttcagagctgagagtcttgaacagagatttatccacatatttattaacagcaaaccagtcattagcattgtttctatagatattaaattaactaaaagtatcccttatgggaaacaaagggatgagccgaattaaaggaataggttgggctagttaactgcagcaggagcatgtccttaaggcacagatagctcatgctactatttgtggcttaagaatgcttttaagcggttttccgccctgggcgggccaggtgttccttgccctcattctggtaaactcacaaccttccagtgtgggtgttagggccattatgaacatgttacagtgctgcagagattttgtttatggccagttttggggccagtttatggccagattttggggggcctgctcccaacatgtcccctttctttgatttgcaaatcaataaaagcaagggcagctttgtcacagtgagctacttctcgcaggagtcaggatccacgtctgcagactatacaaggacaacacagattaaaagcacagtcatcattgaaatcacagaacttccaagtgtttttatccattttcagctccttttaagcactccagttctggcattaaggtcagctgtgcctgggatgctttaaatatttgttcttttaattttaaatccttatattaagctcctacaatgcaccatatcatttgaggttgaggtgccactataccgccatggttccagataataggaacttttgccatacttcttatcatttctgccatctgaccgttttgttcagatcagctgaacatagtgtggccgtggcatgtagactgagaggtgcagtttaagctaaacatccccttaggggaccaattaataatgattccatagaaattgttgtgcagcacctctgcctgttccgcaatgcaatcttcctaaacaagtacgttcattttttctaactgggtccgatcctgtttacaaataggtttttgagggcggtatgcctcaattataggagcagatttattacggtaaatactgagattagaaagcatgtgtaactgtgtcatagagtgattgcatccaggcattattaccagtcaagattgataaatatgcccagtaagtataatcattctctgtgtcagcccttattgaaggaatactcaaggtagtggtgataactgctgtcatagctaccattaaattattcattgtgactggttgtcccgctttcctcaggttttcttccgccatctgtgacagcttcttgatctgtccccaggtgggtggctgtgttcgatgggtgttgctcgtgacagttggggtcctcctcagcgtcagtctctacatggctgcaaccggggagtccttgggatcctctcagagtctcttcctcagcatctggctcatgataaggtttcaggtgtcttgatagtacccaaatcggctattgattttggtctagagaaacacaagcataatctctactccaagttattattttacctatttcccaactttttgttactgaatatctccaccaaatcagttgttctgcttctttctttgcagctggtttctgtagatgctgttcagttgctgataacatctggcctttgggcaggttcaaaacatttaatgttaataatgctacgttcagttgtatctgtggggttccatattctctatttccccctttctgcttttgcaactgctgttttagggaaagattcattctttccactatggcttgtccttgaattgtatgggatatcagtaatgtgtttaatattccacatagagaaaaatgtagctagagcttggctagtatagcctggggcattatctgttttaatagaagctggaatgcccatcactgcaaaacactgcaaaagatgacgtttaacacaagcagaagactctcctgttggcatgtagcccagacaaagtgagaaaaggtgtccacacatacatgtgggcaccaaacgagggaatatgtgtgacatctatttgccaaagagagttaggttccaatccttgaggattaaatcctcctgtaaaagatgaggaatgtaccatttggcaagttggcatcgctggataatagctttagcttctttccaggtaatgctgtatctgtgtttgaggccagaggcattaacatgggttaaattgtgaaagtgtctagcattagatattgcattagcaactaggcgatcagccatttgattcccttcaatcaaaggtcttggaagaggtgtatgagccctaatgtgagtgatgtaaaaagggtgcattctacttctaactgctgtttgcaactgggtaaataaagtaatcagttgttcatctgtatgaaatcgtaactgcgcattttcaattaactgtgtggaatgaaccacgtatgaagaatcagaaatcacattaatagacatatcaaaagcagtcaatacctcagttacagctacaagctcttgctttttgagctgaagtatagggcgtctggaaaactttactttttgagccagaataagaagctttaccattactagacccgtctgtaaaacaatgaaaatgcttagcaggctgcaggttgtttactgcaagaattgtaaatgcaaaccattcacagttttgctcagctaaatggatagtaaagaaacagtctttcaaatatatgactattaaaggccaattttttggaattatagtaggagaaggcagtcctggctgtaatgctcccataggttgtataactgaattgatggctcttaagtcagttaacattctccatttacctgatttttttcttaattatgaaaactggagaattccaaggggaaaatgttggagctatgtgtccattttgtaattgttcaatgactaatttctctaaagcctccagtttctctttacttagcggccattgttctaccaaattggcttatctgttaaccattttaaaggtataggttctggaggcttgacaatggccaccatcaaaaataataccctaatctttggcaggaactttctttctgcttgaagcagttctttcaaaccttgcaaatttttttctagtcccataccagggacataccccatttcatgcattgtatgttgactttgagggctatataattgttctggaattagaacttgtgctccccattgtcataaatctctcccccataaatttacaggtacagaagttataattggttgaatagtaccaggttgtccatcaggcccttcacaatgcaaaatataactactttgatatactttaggggctttaccaactccaactatgttaaattgagcaggttgaattggccacgtggacggccagtgctgtagagaaatgactgaaatgtctgctcctgtatctaccaaacctttaaatttctttccctgaatagttattttcacaggtaggatgtttatcagtaatttgatttacccaataagctgctttgccttgtttatttgtgcttccaaatcctcctgttcgtttaatttcacttttccccatttccacatacgacacaatcaggagctgtgctatgtgcgctctcctggctctgctttccagggaacagaagtagatacaacaatttgaatttcccattataatctgaatcagtgtctcctgtatgtatttgtacgtcttttaaacttaaactagaccttcctaaaagtaatcctattgtccctgctggcaagggtccgcagactcctgttgggaccttttgcgggggttccccaggcagaaggctcacagcttttgtgcagcataaatctactgcagcactactggctgtgggggggtggacagacattgtacaggggtgagggaatggcctgagctagaaatgccccggtttagaatggggccctcatggcgtttcccgaaatcgggttcccttctttatcaaacttaggatgacattggttaacccaatgttttccttttttacattttggacatatttcagaatcagcagttttcttttctccccatctggcggcctgactcgctgatttttttctacattcttttttagtatgaccatgcttcccacagttaaaacaagctccaggaagtggagtatttcctttatccactctcagtcctgccattgcctatgccaacaaagtagctttatgtagattatctctgatatcatcacaggccttgataaaatcaactaaatgtgctttccctctgataggtcacagagcagcctggcaatcgggattagcattgtcgaaagctaataactgcaacactatatcctgagcagccaaatctgcaatcatctttttaagagactcctgtaactgagctataaagtcaacgtatggttctttggatccctgttttatagcactaaaggaagggtattgttctctacctgaagtgattttttcccaagctctaatgcacactcctctaagctgttctatggcatcatcccgcatgaccagttgtgcatctaaaccagcccagcctccaacccccaaaagttggtctgcagttacattaatttgagtttgggcctgggcattgcgagcagcctgaatggaagcttcatctgcccaccaaattttaaattttaagaaccgagcaggagttagacaagctcgagtaagagcatcccagtcagtaggtatcatccaactggaaacagcaacattctttaacagtcccattataaaaggagaacctggtccatactgatgtatagctttttaaaattctttgagtaatttaaaaggaaaaggctcaaatgtagctgtaatatttccctgttgatcttggggggtgtattcattctaacagggaactgccaagcctctgtatcaccctctcctctagcttgctgaattcctgcctgaatagaactaagagtggtcactcggcgctgctcaaacagtcactggggcaactacttttcgcccagtgtcctccagaaaagaaagatctggagggtctttttcttgaaaataataaggagggggtacagaagggtagggatgaatctctccctcctttcctgctttagctttaactggcaaataaacctcgtctgtaacctcttctgttacttcattattcactcattcctcctcatcatcagtgtgaagaagttccaaggtgaaacgaaccagaccccatacttgtcccattgttaccctgaggcttccgagctccccttcttactcaccatggggattgctttaagagtactcgggtgtcctccagctagttttccgttccaaccattgctctggcgacccttcaacctgcattcaagcccccatgaatggacgccacttgccaagaccagctcagtcggggagaccctaacccagcggcgctagaggaattaaagacaccacacacaccgaaatatagaggtgtgaagtgggaaatcaggggtctcacagccttcagaggtgagagccccaaacagagatttacccacatatttattaacagcaaaccagtcattagcattgtttctatagatattaaattaactaaaaatatccattatgggaaacaaagggatgggccaaattaaaggaataggttgggctagttaactgcagcaggagcatgtccttaaggcacagatagctcatgctgttatttgtggcttaagaatgcctttaagcggttttccgccctgggtgggccaggcgttccttgccctcattccagtaaacccacaaccttccagtgtgggcgttagggccattatgaacatgttacagtgttgcagagattttgtttatggccagttttggggccagtttatggccagattttggggggcctgctcccaacataaagtatattgatgttttttttattacagctagtatatatttaagaatgttagtataggattttgaataaattttgtttttaagagaagttataatttaattagatggggaggaaagtctttgaagaggaacctctactttactttttataaagtgattctcctgctcagtctccccagtagctgggattacaggcatgtgccaccacgcctggctaattctgtgtttttagtagagacagggtttctccatgttgttcagggtggtctcaaactccttacttcagatgatctgcccacctcagcctcccaaagtgctgggattacaggcgtgagccaccatgcccagcctgtagtggttctttaatgagcagctttattgctttggcaaaaggttggaataatccatatgagcctatgatgttaggtcccttacagagttgtatgtaacctaaactattcattcaacaaatgttaagattgctgtagtgagaatggtgggaaataagtaggagaaggttaattataaacttattgttaagaagaaggattagtttactttgactagtacgtcttagtcaaaatcattttgaggttatattttgctctgaggtcacctcaactaaaatttttagttcattggatacaatgttaatacctgttaagttaggttaattattggatatatggactaataaatttaagttccgtagagtcttctcatcatatttaagtatttctgcctcttcacagataggtcaattgcactgattaagagacagctaaaccctcatgtgaccagtcttgcaagtctctgtttcgggaacaaatgattatgctatgcctgtacagtcaagatactggcaccattaaacatgtcactgggcaggcagtgccagtttttggtgatgtttttggtaaacaggcagggtttggttttgctgagttccttttattttttaaaatctttctttagtgcttgcctttgttggcttaacaatttggagaaaataattagtttataggtttgcttagttatattgagttttgttaactgtcagtggatcatccaaatatgatggtaactatgcatttttatacatattttatttatttatttatttatttatttatttgagacgaagtttcactcttgttgcccaggctggagtgcagtggcgccatcttggctcactgcaacctctgcctcccgggttcaagcaattctcctgcctcagcctcccaagtagctgggattacaggcatgagccaccatgcccagctaattatgtatttttactagagatggggtttcaccatgttggtcaggctggtctcgagcacttgacctcaggtgatccgcttgcctcagcctcccaaagtgctgggattacaggcgtgagacactgtgcccagcctttatacatattttatagtaggttgtagaagttccctcgtattcctgattatttctattttgaaggagtgttgaggtttgtcactttttttttgcatgtgtttagattgtggtttttgatgttgattctgtaactactgtgtattgcataagttgatttttgaaatgtaagcaatgttgcttccatgaattaaattccactttgtcatggagtacagatgttgtcatatatgggtggattctctttgcaattatattgctccggctttgtgtgttaacatttaaagagatattcatgtatagtattatagtctagcattataatatgcatatatatacacatttatatacatgcacacataaagtatatatagtatatagtctagttatgatagataacataaatattatatataacttgtaatgtggtatatagctgttgtatataaatggcattatagtaaacaacttaatgaattatgacattatagtatataaaattgatatagttttagtctccagtgtatagtgggtttcatttctatgtcagcctgcagaattattcaaataccacattctcatcctcccacgggaacaaaggaaaatcttaccctcttgatgctacagtgtgccattcaaaaatattcgtgatcatggatttaggaaagattctatgatatgacaatacaagcactaggaacaaagaaaaagtatgtaattgagactgcattgaaattttaaacttttttgtgtttcaaaggacaccacaccaggaagacattgaaaagcatatagccatgccagcctgaatgcacctgatcttttttgatctcagttcctgccaggattgggtctggttattacttatatgagagtaatactgggaatactgagtgctgtacactttaaaaaaagaaaaggggccgagcgctgtggcttatacctgtaatcccagcactttgggaggctgacgcgggagctcaggagttcaagactggcctcaaaaacacggtaaaccccatgtctaccaaaaatacaaaaaattacctgggagtggtggtgcacgcctttggtcccagctactcatgaggctgaggtaggaggatcatttgagcctggaaggtggaagttgcagtgagctgagatgatgccactacaccccaccctgggcgacagagcgagactctgtctcaaaacaaggtagagaaacttgatgaattatcatgggttgaggaaatggaacttgattgaatatcaagttttggggggattctccctgaactcccttagaaggatttttgatgtaactgggctctgcaggagaaggacaaaacgggtcaagaagagggcctaagcagcctgactcatgtttggtcaaggaaggaagaagtccgtaagactcccgtagctggctctttttaggaaggacaatccctaaatatttgatttcctcgctatattccaaaatacccgctttccctctctaaaggacatcttcaattatggatccaccctgacatatttgaaagagctgcagtattttaattgatttttatattcccacagagccatatatgactctctttaaaattttattatgttggctgggtccattggctcacgcctgtaattccagcattttgggaggccaaggcgggcggatcatgaggtcaggagatcaagaccattctggctaatatggtgaaaccccatcactactaaaaatataaaaaaaaattagctgggtgtggtggcaggtgcctgtagtcctagctacttgtgagactgaggcaggagaatgggtgtgaacttgggaggcggcgcttgcagtgagccgagatcatgccattgtactgtagcctgggcaacaagagcaaaactccatttcaataaaacaaaacaaaaaaacccacaaaaattagctgggcatggtcgtgggcacctataatcccagctactcgggaggctgaggcaggagaattgcttgaacccaggaggtggaggttgcaatgagccaagattgtgccattgcactccagcctgggtgacagagcaagactctgactcaaaaaaaaaataagtacacctaataattcctgatgttaagcaccttttttatgtgtgttgtggtcatttggatttatcttggagaaatgttattggactacattgcctatcttttttttttttttttttttttgagacagagtctcgctgtcttgcctcggctggagcacaatggcatgatcctggctcactgcagcttctgcctcccaaggggctgggattatgggtgtctaccaccacccccagctaatttttgtatttttagtgtagatgaggtttcaccgtgttgccaggctggtctcgaactactgacctcaagtgatctgcccgcctcggcctcccaaagagctgggattaagctgtgagccactgcacccagcccattgcccatgttttgatcaagtagttttatacttgggacagtaatttgtttatttattattttttttgagacggagtctcactctgttgccgggctagggtgcagtggcccaatctcggctcactgcaacctctgcctcccaggttcaagcaattatcctgcctcagcctcccgagtagctggaaccctgggtgtgtgccaccacacccagctaattttttgtatttttagtagagacagggtttcactgtgttaaccaggctggtctcgatctcctgacctcatgatccacctgcctcggcctcccaaagtgaatttattatttttaattactataaaataaaattacattttattagcttaagcaattttaagtgtacagtttacttagacagctctgtgtaacttatctaagatgaatcataatctgttttgtgtgtgactaccattgtgtaatttctatagcatcgtgaattttcatgtatgaagcatgggacagggtgttattttctaagattaaataatatttcattgtatgtagatgcctaccacatttttgttatgcatacaaccatcagtggacatgtggatggatccagctcttggctattgtcaacagtggttttcaaatatgtctccatgatctggttttctactttttttttttttaattcagtataaatagacctacaagtcagctattggaagatatggtaattttgtttgtttgtttgttttttttgagactgagtctcactgtcgcccaggctggatggagtgcagtggcgcaatcttggctcactgcaacctccgcctcccagattccagcaattctcctgcctcagcctcccaagtagctgggattacagatgtgtgccaccacacccggctaatttttgtacttttagtagagacggggttttgccatttttgccaggctggtcccaaacccctgacctcaggtgatctgccctccttggcctcccaaagtactgggattacaggcatgagccaccattcctggccatgattttgttatttttaaaggcactatcatactattttccagaagggctgagccatttataatccttgggacagagcacatgggttgccttttccctctgtgaatggtgtcctctcataaacaaaagtttgttttgtttttgttttcagacagagtctcgctctgtctccatgctagagtacagtggcacgatctcagctcactgcaacctccacctcctgggttcaagtgattctcgtgcctcagtctcccgagtagctggtgttacaggtacgttccaccacacccagctaattttcttatttttagtagagacgggtttcaccatgttgcccaggctggtctcaaactcctggcttcaagtgatttactcgcctcagcctgcgatagtgctgggattacaggcatgaaccaccacgcctgttcacacaaacgtttttatgtttgataaatatttgcctttttgtcacgatttggcaccctggggtttttacctctcaatcttgttgacattcagctttgagcaattcagttacaatttaggctttactacccaagcagagattcccagaatcgtttcttctcatgagtttggtttttttttagttatttataactgtcttattagttagattgatgggcccctcgcaaaatccagttttttgtttgtttctgttgctggtatttagaacgaaatctactttctagatatcatgaaagtttaaacttgggaacagacattttcaaggatacacagcctcaagactcctcatgttaacttttttctgcatgcgaatttacaggactttgttacagcagctactacagatccacactacaaatagacattaggggcagcccagaaagcacatctttctgtgtggattcaccggaaactcatacattttcctattctgctgttcctttaccccatggttaaattgtagcatcggaattgctttatggaagaaagtgagtataggcagcgtaagaggtctgatgaccaagtcatgaaatctttggagtccatagcatcatgagaacttcttgggaatagggtatagatgcccagtgatatcagtctcacccatccttctctacacatatgggatgttttaggactcagtggcctttgaggatgtggctgtgaacttcaccccagacgagtgggctttgctggatccttcccaaaagaatctctaccgagaagtgatgcaagaaaccttgaggaacttggcctctataggtaacggtgacaatattactccctcagtgaattagagaagtgtttctcattcatcagtgctgttgagtaatttggaatatggacaggcaatactttgatgagtaagtgaggcacggttgtagtgtatcatgaacatagaatcaaataatcatttcataattttatactaatccaggcctgtgtatctgcgcctgtattttagggaagaaatggaaagaccagaacattgaaaatgagtacaaaaatcccaggagcaacctaaggtaatctgcactcacaggacaaagcagtgtctctagaaaattttagagtgggaggaaatgttaaaaagaagggaacaaacaaaaaagctgagttccattatatttattcttagaatattttctctaaaaacatgcatttatttgtgacacaggctggacaccatggcttatgcctataatcaaccctttgagaggttcagaccagaggattgcatgagcccaggagtctgaggctgcactgagccatgatgacatcattagactgtagcctgggcaacagggcaagattctcagaaacaaaattaaaagacaaagagtttttgtatgtgtacagtagtttacatggaaatcgtattaagctccatatattttttgataatagatacggctgggccatctggtagaccatgtggtccattcatgttcaaacaattcagacagagtagaaagcctacactttgctggataatgttaaaaatgcaagtgtaagacttgtgaatgaatataaaatcactgataaacccattaaatgtgcttttcatttttcacagaggtcttatggaagagagactctttgaaagtgaaggtcatcagcatggagaaattttgacccaggttctggatgacatgctgaagaagaaaactggagtagaatcatgtgaaaggaatgtgtgtgaggtcagcatgggtcatttatcccttaataagcacaccagagctgacactggacacaagccatatgagtatcaggaatatggacagacgccatataaatgtacatactgtaagaaagccttcagctgtctcccctacttttgcagacatgtaattgcacacactggagaaaaaccctatgaatgtaaggattctgcgaagacatttagtttttccatttattttcatagtcataaaagagctcactctggagggaacccctatgaatgtaaacaatctggaaaaccctttggatgcgcctcagaacttcaaatgcatgcaaggactcagtgtggagaaaccttacaaatgtaagaaatgtgaaaaagcatttaataacttatcttcctttcaaatacatgaaagaatgcacagaggagggaagtatcatgcctgtaagggttctgggaatacataccgtttttctggtttctatcatagacataaaatgcctcatgctggcgggaagttttatggatgtaagaaatgtgggaaagcctttattagtttctgtgcctttcgataccatcaaaggactcacactaaagagaaaccctatgcgtgtaaacaatgtgggaaagcctatatttcttacacttcttttcaatatcatcagttgaatcacactggagcgaaatgctatgagtgtaagcagtgtggcaaaggcttcgatttgcccaattccattcgatatcatgaaatgactcacactggggagaaaccccatgaatgtaagcaatgtgggaaaactttcagatgtgcctcaagcctccgaatacatggaaggactcacactggggagaaaccctatgaatgtaaacagtgtggtaaagtctctcgttattggagcggccttcaggtacatgaagtaactcatattggaaaaaagctttatgaatgtaaggaatgtgggaaatcatactatagttctggttcctttctaaatcataaaaggatccacaccagggagaagtcttatgaatgcaaggaatgtgggaaagcatttggtaatcccatatcctttcaaaaacatgaagggagtcacagaaaatggaagccttatgaatgtaaggaatgtgggaaggtattcagtttttccagttcccttcggagacatgaaaggacacacactgaaaaactctgtgaatgtaaacagcatgggaaaggattttttcatagaagctgtcctagacacatgaagatagacactggagagatacttcataaacgtaagatacgtggaaaagtctttcattctcctagttcatttcaaacatgtgaaagatctcacactagagaaaaacgctataaatgcaagcaatgtggaaaacccttcatttatttcaatgcctttcaacgtcatcaaaggagccacactggagagaacccctatgagtgtaagcaatgtgggaaagcctgtatttcttccactgcttttcagtgtcgtgaattgagtcacactggagcaaaacgctataagtgtaagcagtgtggcaaaggcttcaatttgcccagttccattcgatatcatgaaatgactcacactggagagaaaccctatgaatgtaagcaatgtgggagagctttcagatctgcctcacacctacgaacacatgaaaggactcacattggggagaaaccctatgaatgtaaacagtgtggtaaagtctatcgttactggagtggccttcgaatacatggactaactcatattggaaaaaagccttatgaatttaatgaccgtgggaaatcattctatagttccaatttctttctaaatcataaaagggtccacactagagtgaagacatatgaatgcaaggaatgtgggaaagcatttgataatcctacatcctttcaaaaacatgaagggagtcacagaaaagggaagtcttatgaatgtaaggaatgtgggaaggtattcagtttttcccgttcctttcgtagatatgaaagggcacacactggcgaaaagccctgtgaataaacaatgtgggaaaggatttttcatatcttctgtggagctttgaatgcatgaaaagacagactacagagaaatgctaaatgtaaggcgtgtataaaagcatttagtaatttctcttccttgcttatacatggaaggatgcacactggagagaagccatatgaatgtaagaattgtgggaaagccttcacatctgccaagagccttcaaaatcatggaaggacacacaccggagagaaaccatgtgaatgcaagcaatgtggcaaagctttcatttgttccagttcctgtcagagacatgaagagacacattctgttaatatgcattcagttatcctaattcctttgaaacacagaaaaagagtagggaaaggacctctgagataactgttttctgagttgagaagagctacttgtgaatggacaattaaatctagatgtatttagatctgatacaattcatctgtagccaacctttttttaaatttttttattttttagatggagtcttgctctgtcgcccagactggagtgcagtggcacgatcttggctcactgcaacctccgcctcctgggtttaagcaattctcctgcctcagcctcccaagtagctgggattacaggtaaccgccatcacgcctggctaattttagagatggagtttcaccatgttggccaggctggtctcaaactcctgacctcaagtgatccacccacctcggcctcccaaagtgctgggattacaggcgtgagccactgcgccctgccacctatagccaatcttaatgagatttcataggcacagacaaggaaggttatcagtcacatattagaggcaccacacagggagagcagtgtgtggccacatgcttcagcccattttttctgattctcttgcttgcaaattaagagtattctccaaatcacttgactttccttttctcagagttatagttctccagagatgtcaccagatgattcacattaaaggtacatttccagttgacttttttatttcagatattagtaaatgattaccagagaactaattcaaactgtcatggttggaaatactctgatgctcaactccctaatctatagagtgagttaaggtctatactcttttgcaagcattgttctagtggcagtgaccctgttcatgattcagcctgacatttactatgctgccctgaaaaccaactagatgggagcttgtttctctctgcattgtgtagtgagtggtgtcacccaggactttcatgtgagaaaaagcaccttgcttttaatctgggaattttgagtgttttttgtaatgcctcagtttattcttatttatggttgattatatgtgatttagaacacttgctatttatgtctgatcccacaaatcagcactcactttatttgcaaagcaccaaatttcgtgtaagaggtgtagtaattgggaatgtgaagctaagttacattctttctctttatttacatgtctccctttctataggcctctttttccccccctttttgagacggagtctctgtcgccaggctggagtgcagtggcgcaatctcagctcactgcaacctccgactccctggttcaagcaattctcctgcctcagcctcctgagtagctgggattacaggcatgcaccaccacgcccagctaatttttatatttttagtagagacaaggtttcaccatgttggccaggaaggtcttgatctcctgacctcgtgatctgctcactttggcctcccaaagtgctgggattacaggtgtgagccactgtgccctgcctctataggcttcttaaaccatttactcaaggcatatgtcagaccctggtcaaagtaatacaaaaaaggtatatacaaaaattgtgttaactccaaaaggtggaatgtaactctttgagaactactccaataagtaaactcaggtattatacacatataggaaggagaactgttgccactggtgaattgttcgtagctttcactctcctcatgggtattcatttttaaagaaagtctccctctgtcacccaggttggagagcagtggtgcaatcatagctcactgtagccttgaactcttgggcttctccagcctcagccttctgaagtagctgggaccacaggtgcttgccaccacacttggctaatttttgtattactggtagagatgaggttttgccatgtggcccaggctggtcttgaactcctgtgctcaagcagtctttctgtcacggcttcccaaagtgctgggattatagctgtgaggcattgtgcctggctctgcctcagcctcttcagtagttggaagtacaggcacaggccacctcggctagctaacttttaaaattatttaataatttgtcttttaatagcttttgtagacagtcttactctgtcacgcaggctggtgtgcagtggcaggatcatggctcactgcagcctcgacctccctgggctccggtgatcttcctatctcagtctctcaagtggctgggactacaggcatgtgacacaacacccaggtaatgttcgtattttttgtagttacagggttttgccttgttgttcattctggtctcaaactctgggttgctaacaatcctcccaccttggcatcctgtagtgctggggttacaggcttgagctatggcactcggcctcccaggtagttgttgaaaggcctggcctgaggccaggcgcggtggctcacgcctgtaatcccagcactttgggaggccgaggcaggcggatcacctgaggtcaggagttcgagaccagcctcaacatggagaaaccccatctctactaaaaatacaaaataaccgggagtggtggtgcatgcctgcaatcccagctacttgggaggctgaggcaggagaattgtttgaacctgggaggcggaggttgcagtgagccgagattgcgccattgcactccagcctgggcaacaacagcaaaactccgtctcaaaaaaagaaaaaaaatgaaaggcctggcctgccaatggttcgagtggcctctccccccacccatccacggtccctcccttcaggtaccactgcaaatttgcagagggtaacagaggctgaggccagtatggaggctgcagagggagggaaatggagctcccatgggtgcttcctgggcggcccaacctattctgcatgtggcctccagctgttcagagcagctccaggagtgtggattctgataagccgcagagccctggaaagcaagagactatgtgcagatgtccttggcagggcgctgtcccttctgtggttggacctctggagcctggggccatattcgggaacagtgttttggttctgacatgcatagggtccctggggtcagacggtaatctgtatatatgaagaaaatctgtgaaggtcaggtttggagacagaattgtttgggacctcacctgcagaaacagtttatgaagttgactatttagctcagaagcttagactgtcacctggtaagagtttcctgctggtaaatgtgaaggtctggaaggagggagcatttccacactgtgaggaggggatgggggagtatgagagaaagccttggctatgtctcatcctcagttgccaccccctgaaggacacctgcctctccctcctggtccaatcatgcctgacctggtcttggttcctctctgactctgaggtgacgagattgccctgctggacactgagtctggaattcccagtacacacttgtaaccccaatggagaagaaaggagcaggaacagctctttgagtgaggaaaaagatagtgccctgtctaaaattcgggagcaaatttcactaaaatgaaaatatccaatgaccaagttgtagggagggagctggcccttagatggtggctagaacccctcacttctgctccccaggtccagttacccagggcttctactgtcactctgggatgaggggatgggggcctggacctctgtccaatcaggagtgctggggcggggccctgccaactgtctgtcctgggaaggtggggacgcattcccgctctcaccttggtgaccttgcctactgagattgggatccagtctttcccgctgtgaaagggaccaggtccctacaccacaactgccgtcgctctgtcgcctgcactgtgacctgcactagtcacgggagccctagagagataagccaggacgcctggaaatggtgagtgtttggggccagctacccgaaacccggcaggggctgggtggaaacggccagaaccggctgtgacgggaccccaggccccctgcaggcgacttcagggtttgggacccgagttctggcacatctcggccctcagtctcctcggccgcaaggtggggttgtgccagcagccgggaccttgggcgtcctgtcccgtccctgcctggtgactgcggtcccggagccctctgtgggcagctccgcccccgcaacctcgcgtctgtgcgggggccacacatgacataaggagagtcctgccttgggtgtagggttcgtgtgggaggagctgcggtccctggggcccccagtacgtttttttcctgttaaactgggccgggggtggtggctcacgcctgtaatcccagcactttgggaggccgaggcaggcggatcacgaggtcggaagatcgagaccatcctggctaacatggtgaaaccccgtctctactaaaaatacaaaaaactagccgggtgtggtggcgtgcgcctatactcccagctactcgggaggctgcagcaggagaatggcgtgaacccgggaggcggagcttgcagtgaaccgagatcacgccactgcactccggcctgggcgacacagccagactccgtctcaaaaaaaaaaaaaaaaaaaaaaaaagggagcttctgggttgctgaacacatggcgaggctgggatggtgggacacccagagagagcagggaggctctgtatccccctactccacatcttgctctatcatcctcatctggctgttcagctatatcctttgtaatgtcctttacaatatataggtaaacaaaaaattaaactgaggcactgttaaaaattaaacagtttgaacatatggtgatttatgaatgagaatcacccagtcgtggtttgtggtttgttatcgaaaaatttagaagaattgcattttagttgtgtttcgattccttaggtagaaccttagtgcactacaaacactttggtccaattgctgctcttaatttcttcacactgcctatggggactggtttatccctgcattttcctcatctatgggatacagggtctcaaatcctcaaccctgtgaccccagcctaactcttgtagtaatgttaggaaattttcaatttcttccccaaatctccaaacgttaaccctttttctccaattcacagtattatcaacgatttgttctttattgtagagtatatttcttcatcctttctctcacatcgatgcagtttttaatggttatcattttttcacagggtccatggatgacaatttaaaaatatttgtgttgtttctgaacatttcacataagaggaaagtagagaataatcatgttacacaccagtgaaaaaacccttattttatttatttattttatttttttttgtgagacggagtcttgctctgttgctcaggctgaagtgcagtggtgcagtctcagctcattgcaacctctgcctcctgggttcaggcgattctcttgcctcagcctcccgcgtagctggcatccaccaccacgcccagctaattttggtattttttagtagagacaggatttctccatgttagccaggctggtcttttaactcctgatctcaggtgatctgcccacctcggcctctcaaagtgctgggattacaggggtgagcaactgcacccggcccactgatgtatttcaaacaggttaccttatggtgatattcagtctttatttaaggatatatgacatctttccatttattaccctttactttgatgtctttcagtatatactttttgcataataattattttatatccttcctgagaattttagggatttcaagaaagttaattgtggttgcagtggctcatgcctataattccagcactttgggaggccaaggcaggcaattcacttgaggccaggagttcaagaccactctgggcaacatggcaaaaccttgtctttactaaaaatattaacataaaaattagcagccgggtgcggtggctcactcctgtaatcctagcactttgggaggccaaggcaggaggattgcctgagcttaggagttcaggaccagcctgggcaacacagtgaaacctcatctctactaagatacaaaaacttagccaggcgtggctgtgtgcgcctataatctcagctacttgggaggctgaggcaggagaatcacttgagcccgggaggcagaagttacagtgagccgagatcacgccactgcactccagcctgggagacagaggaagactccgtctcaaaaaaaaaaaaaaaaaattacattcaacgagttgttgctggcaattcaacatgcactgagatttatttctttatagagtttgcattgtagaaactgaaaatattgcatatgcaccaaatacataaaacagttcacaatgaaccaaaatactgatggagccagtattgtaaattataatttccttatgtttcttcatagtttcacaacctgtatgtgtgtatatatgtgtatgtgtctctgtgtgtgtgtgtgtgtatatatatatatatattttttaattttttgtatttttagtagagacagggtttcaccgtgttagccaggatggtctcgatctcttgacctcatgatccgcccgcctcagcctcccaaagtgctgggattacaggcgtgagccactgcacccggccttatttttttattttttaaaaagtactttatggatgggggttatcactattttgctcagggttttctggaattcctagtctgaagcaatcctcttgccttgtctttccaaaatagttagattacaggcatgatacaccatgcctggccactaatttctttttttttttttttttttttttttttgagacggagtctcgctctgtcacccaggctggagtgcagtggcacgatctcggctcactgcaagctccacctcctggattcacgccattctcctgcctcagcctcccgagtagctgggactactggcacccaccaccactcctggctaatttttttttttgtatttttagtagagacgggggtttcatcgtgttagccaggatggtcttgatccgcccgccttggcctcccaaagtgttgggattacatgggtgaggtaccgcacctggccacctggccactaatttctttttttttttctttttttttttttttttttttgatacggagtctcctctgtcacccaggctggagtgcagtggcgggatctcggctcactgcaagctccgccttctgggttcacgccattctcctgcctcagcctcccgagtagctgggactacaggcgcccgccactgcgcccagctagttttttgtatttttagtagagacggggtttcaccgtggtctcgatatcctgacctcatgatccgcctgcctcggccacccaaagtgctgggattacaggcgtgagccaccgcgcccggccttcttttttttgtttttttttttgagacggagtttcactcttgttgcccaggctggagtgcaatggcacgatctcggctccctgcaacctctgcctcccaggttcaggcgattctcctgcctcagcctgagtgtctgggattacaggcgcacaccaccacacctggctaattttgtatttttagtagagacggggttttgccatgttggtcaggctggtcttgaactcctgacctcaggtgatccacctacctcagcttcccaaaatgctgggattacaggtgtgagccaccgcacccggccactaatttcttttttttttttttttttttctttgagacggagtctcactctttttgcccaggctggagtgcaatggtgcaatctcagctcactgcaacttccgcctcctgggttcaagcgattctcctgtctcagcctctcaagtagctgggattaaaggcgtccaccaccacgctcggctaattttttgtatttttagtaaagatgaggattgtggccaggctggttccgaactcctgacctcaaatgatccacccgccttggcctcccaaaatgcgaggatttcaggtgtgagccactgtatctggccactaatttctttttatcactgaataatttattgaaaagttcatcttgagctgggcttggtgccttatgcctgaattgccagctatatgggaagctgaggtaggaggattgcttgaggccagaagttggagatcagcctggtagatacagtgagatcccccatgtcttggggaaaaaaaaatttgctcatcttgtctgactttagtttttgggaaatatggataaggctgctgaaaacgtctttgtgaggacttttctggggacatgagctttcaattcattggggtcaatatgtagtagggttactgatgaatcatgtggtaagaccatgcttatcttcagagctcaccagactgtcttacagagtgactgtagaatattccattcacatcaacagtgaatgggagttcctgtggcttcccttttttttttttttttttgagatggggtctcgctctgttgcccaggctagagtgcagtggtgcgatcttggctcactgcaacctccaccttctgggttcaagcattctcctgctcaacctcccaagtagctggaattacaggcactcgcccagctaatttttgtatttttagtagagatgagtttcaccatgttaggcaggctggtctcaaactcctgacctcaggtgatccacctgcctcagcctcctaaagtgctgggattacaggcgtgagtcactgtacccagcctgcctatctttaatcaactagtttatttcatacaataatcaatcattattataaaaaacataaaatttaccagcttaaacagtttgatgtatacagttgaattagcttgagaactctacataacatctaatatgaattatacttattttttttttggctactggctttttacaattatagcatcctgtctgaggtttcatgcatgttgcagcaggggccaggatgttattttccaagactgaacaatatcctgttgtatttatatgcttaccatatttaggttatccatttagcctctcagtgggtatgtgcattggtccacctcttagctattgtgaaaaatgcttttcaaatatgtcttcaagatcaggctttacatggcaacagcagactctggggattacttgagataggagaaagggagaagggcaagtgttgaaatactactgggtactatgctgtgtacctgggtaacaggatcatttgtactgcagagctcgaaatctgaaagtgctggaattacaggcatgagccaccatgcccagccctgttctttggtttttaaaattcaagtagacgttgggcacagcagctggctatagtgttagcttcttgaaaggctgaagtggaaaaatcgccgtagcccagggattggaggatttagtgcaccatgatctcacctgtgaatagctactgcactccaacctgggttacatagcaagactctgtctctaaaaaaaggaaaaaaaaagccaggcgcagtggctcatgcctgcaatcccagcactttgggaggccaaggcaggtggatcacctgaggtcaggagtttgagaccagcctggccaacattgtgaaaccccatctctactaaaagtacaaaaaattaggtgggtgtggtggcaggtgcctgtaatcccagctactcggaaggctgaggcaggagaatcacttgaacttgagaggcaggggttgtggtgagccaagatcgcgccattgcaccccagcctaagccacaagagcgagactccttctcaaaaaaaaaaaaaagattctaattgtttcttttacattactgatttgaactaatgaaaaaaaagtttaaagtttgttaaacaataaaagtgaatttgatttagaattctgactgaggactataggcaaatatccataacctgggagcagttccgtctcactgctcctatgcagtattttggttcagctcatgtatagatggtgaggattcattatgtgaaaaatcacatctaagtttgggtgcaagagtacatctggccatagttcagagaggcataatcactaaccccatcagatattatcttatgtgttacaaaattagctaatttctcagaccaaaccccactttgaatgattgccctcattactcatttgggtcctggaggtccacattcttttgtttttttttttttttttttttttgagacggagtctcgctctgttgcccaggctggagtgcagtggcacgatctcagctcactgcaagctccgcctccaaggttcacgccattctcctgcctcagcctcccaagtagctgggactacaggcgcccgccaccacgcccagctaatttttttatttttagtagagacgaggtttcaccgtgtcagccaggagggtctcgatctcctgacctcgtgatccgcccacctcggcctcccaaagcgctgggattacaggcgtgggccaccgcgcctggtggaggtccacattctttacctaccctgccgtgtggccccggaagctgacttccaagtaccacagcagtcaggttcccatagcctctggctttcggttggcccagttcatgggaggtgctgccaggaaagcaggtaataggagagaaaatcaggatctctagtccattggctgccaccctgctgtcctgagaggttggcagtcatcctttcctctgctcctgctgaatggccctctactaaagctcagggtgttcctggggtctcataacagctctgtcttgtctctgcctcaggcctagtgatgtgctttgctccctgctgttggtggactgctcctcttgtgggtatatcacaggctccctgtaatgctattggttctgtattttaaataataatttctctcacttaactacacttttgagtgttacactcttccttcctgatctatgtccaaaacagaagtctcaataacatgcaaagatgcagtgtgttaagcaaaagtggaagataacgagaccatttcaggtagattcatatgctgcagtcctacaatggtgtatggttaacataggaaaatgaggccattggggtgacttagctcaggttgtgctaatgaaatgccatgggctgagcttctcaaacagcgacattattttttattttttaaacatttctccagcatgagatatctaaaatctagctgccaggcaatatgattcctggtaaagaccaagttcctggctgggatatagacaccttcttgctataccctcatatggaagaaagagtgagtgttttctccctctctcttcccgcccgccttggctttccaaagtgttgggattacaggtgtgaggcactgtgcccagccttcgttggaagtcactaatgccaccattagagtccaaccttgtgaccttatgtaacccgaattatttccttaagtgctcatcttcaaatgacatcatgttggggtatagagattcaaagtatgaatttggtgggtgactaaattcaatacacagcaagggtacaagaaagaagttcataaaaggggctttggacccatgcatgcagatctgactgtacagattgccagatggtgagcatgttcaatggagagaggtcacagatagctatatattagcatgtaggggccaggggcagtggcttatgcctgtaatcctagcactttgggaggccaaggtgagcagatcacttaaggtcaggagtttgataccagcctggccaatatggagaaaccccatctctcctaaaaataccaaaaattagccaggcgtggtggcacatgcctgtagtcccagctactcaggaggttgagacatgagaatcgcctgaacccggggtgggagaggttgcagtaagccgagattgtaccactgcattccagcctgggcgacagagtgacactctgtctcaaaaaaaaaaaaaaaaatacacacacacacacacaaaacagactgggcacggtggctaacaccagaagtcccagcactttgggaggcgcagtcaagcggatcacctgaggtcaggagttggagaccagcctggctaacatggtgaatgaaaccctgtctctactaaaaatacaaaacaattagtcaggcatggtggcactcacctgtaatcccagctacttgggaagctgagacaggaaaatcaattgaatctgggaggcggaggttgcagtgagccgagatcacgccattgcactccagcctgggcgacaagagcaaaactccctctaaaaaaaaccacaaaaacaaaaacttatgctgggacaaaagtcatgatcaaggactgttcttgggaaaccagaatatatggttagataatttttttctttttttctttttttgagacagtctcgttctgtcacccaggctggagtgcagtggtgcgatcctggctcactgcttacctccgcctcccaggttcaagcgattctcctgcctcagcttcctcagtagctgagactacgggtttgtgcctggctaatttttgtatttttagtagagacagtgttttgccatgttggccaggctgctctcaaactcctgacctctggtgattgcctacctcggcctcccgaagtgctgggattacaggtgtgagccactgcacccagcctggtcagataacttctgagacagttttgtacttttatgagggtaggtaatgtgggaaatgcattagagcagcagtccccaacctttttggcaccagggaccagtttcgtgggagaaaagtttttcacagaggagggtggggagatggtttttggatgaaactgtttcacctcagctcatcagggattagtttctcataaggagcatgcaacctagatctctcacatgtgcagttcacaatagggttatcaacccaagaaaatctaataccactgctgctctgacaggaggcagagcttaggcagtaacgctcactcgcttctgcttacctcccgctgtgtggcctagttcctaacaggccatggacaggtacccgtctgtacccgagagttggggacacgtgaattagaggacactcaggtggtgttcagtggagaatggatggcttgtttgctgtgtgagaaaatcttccacatatttggtcatagagatattgcattgtgtgaatgcacaggaaaaacattttgagtttttccactcttagatccctgtgcaattttgagaaatccagtcacaacagtgtgtggatgttaatgccgcccttaccacaagagggagcttcattgacgttgcctttctggaaaatggttcaaaggactttgttggaaattctactctactctactctactgtatttatgttatgttatgttgttatgttatgttatgttatgttatgttatgttatgttatgttatgttatgttattttagagacaaggtcttgctctgttgcccaggctggagtgcagtgttgcagtctcagctcactgcaacctctgcctcccaggttcaagtgattctcctgcttcagcctcccgagtagctgggattacaggtggccaccaccccagccggctaatttttgtacttttagtagagacagggtttcactatgttggccaggctggtctagaactcctgacctcaagtgatccgcccgccttggcctcccaaagtgctgggattataggcataagccgccgtgcctggcccctgaaatactttttaatatagggtgtaagccaggcgcggtggctcacatctgtaatacaaatacaaatacaaaaattaaccaggtgtggtagtgcgtgcctgtaatcccagctactcgggaggctgaggcaggagaattgcttgaacccagcaggtgaaggttgcagtgagctgagatcgcaccactgcactcaagcctggcgacagagcgagactctgtctcaaaaaaaaaaaaagtgtgtaacagttggtgaaaaggttcaaaaaaaaaaagaaaagaaaagaaaggtgacacttaaatttacatgacttttttttttttttttttgagacagcgtcttgctctgtcacccaggctggagtgcagtggcacaatcttggctcaatgcaagctctgcctcccaggttcatgccattctcctgcctcagcctcctgagtagctgggactacgggcgcccgccaccacgcccggctaattttttgtatttttagtagagacagggtttcaccatgttagccaggatggtctcgatctcctgacctcgtgatctgtctaccttggcctcccaaagtgctgggataacaggcgtgagccaccgcacccagcctacatgacttaactttttaccttgttaaacagagagcaatcaaccctgtgaacgttatgttccagattctgacaagtgtgttgaaaaaattctacacactaaatgaaataggagtaatgggtgagagagtgtgaccttgagtttcaagttggggtaaggggggcggaaaagaagacagtgtcttgaggtggtgacatctgtagtgagatctgaaatgacgtgttagtatatgaagtcaggaaagaggattctgggaagatggcagaataggaagtatcaagcagaaactacaggaagccatttttgtgaactgagttcctctgctgggccctcagaaaccagacctaccccagcgattaggaaattacacctaggcaatcgtcattgccccacacgctacaaagaacgttcagtagacaatggcttgagaaatgcgcccagtccaatctttgggtaagccaggtgcagagatgtacaaaaagactgtccttggcaaagttctatggtcacatgatgtttgaggcagttctgcatatcatatgagggccttattggagttcttgtgtatctctgccaagagagtactgcacagcagaggtcattattgcaacttccgtgccatttatttattttgagacagagtcttgctcttttgccaggctgaagtgcagtggcacgatctcagctcactgcagtctctgcctcccgggttcaagggattcctctgcctcagcctcctgagtagctgggactataggagcccgccaccacgcccggctaattttttgtattttagtagagacaggtttcaccatgttggccagaatggtctcaatctcctgacttcatgatccgcccgcctcggcctcccaaagtgccgggattacaggcatgagccactgcacccagccacttctgtgccatttaattgttcaccagttgccacaggtctatctgtgtacacctgagttgcttgagtggttctaaacaaatgaatttaactttcattgtggtgttgaatttttgtatataccttttatgaattattttgaccgtgggctgaccaatatcatgagtaaaagatttaaaaggtctagaggagccaggcatgttggctcatgcctataatcccagcactttgggaggccgaggcagatggatcgcttgaggccaggagtttagagaccagtctggccaacatggtgaaactccaattctacaaaaaacacaaaaattaactgggcatggtggtgttcgcctgtagtgccagctacttgggaggttgtgacgagacttgcttgaacctgggaagcagaggttgcagtgagctgagatcgtgccactgcaattcagcctaggcaacagagcgacactctgtctcaaaaaaaaaaaaaaaaaagccataggtaggaagcaaaatgtaaataatgagaaaaatatatatcttaagttcacatttgaaatatgtaagaaaatttggtgatgctgcaaataaactgaggattgtaattatataaattacaagtttttcctgagaaaaaacacattttcaacctaagtacattgatcttaaaggatttttcctttgctttttgaccttgctttgtgaaaaagtgcaaaaataagacatgaatagtcaaaataagaatttttgggccaggcgtggtggctcacacttataatcccagcactttgggaggccgaggtgggcggatcacgaggccaggagatcgagaccatcctggctaacatggtgaaaccctgtctctactaaaaaaaaaaatacaaaaaaatagccaggcgtggtggcgggcacctgtagtcccagctactcgggaagctgaggcaggagaatggcgtgaaccagggaggcggaggcttgcagtgagccgagatcgcgccactgccctccagcctgggcaacagagcaagactccatctcaaaaaaaaaaaaaggaatttttggccaggcatggtggctcacacctgtaatcctggcactttgggaggccgaggcaggtggatcacatgaggtcaggagtttgagaccagcctggccaacatggtgaaaccctgtctactaaaaatacaaaaaaatagccaggcatggtggcaggtgcctgtaattccagctacttgggaggctgaggcaggagaatcacttgaccccaggaggcagaggttgcggtgagccaagattgcaccactgtcctccagactctgtctccaaaaaaaaaaaattcatatctcacaaatcaaggtattttccatatgtcatcacacatagttaaggtttggtcagtcagtgattgcttctatgtctgctgggactgggatttttactctagggagactgaaataagcttttgtgaagagaagcacccatgacaccttaaaggaaatgatcggattgttccatgcatgacttttccacgatgtcattagcttcataatattagcataagagggttcctgacaagtttgcatcaacagcatgttaccagagaaagaaagacttgattggaatagtgatgctgactttgttctttactgggcaggaaattcagttttcaaaaacatattggccccataggactcaaggtgatttttttaaaaaagtagtagccaattgtggtggctcatgtctgtaatcccagaacttggggagatggagacagaagaatcacatgatccagcagtcaatgaccagcctgggaaacagggagactccatctctacaaaaaataaataaataaaatcatagtatataccttgataagaagtgaatttatagattttaactgaggtatgttatggttaacaatgtccataaattgtagggaatatatcagggtttagagaatagtatggtaaaaactggtccagaagtctgatggctggcctcccctcgccagaaggccgagtcttttgcccctgaacaggcacatgtcatacacctgcaatgtgagatgatgctcttcagtgaccatgatggatcaatacaaaaataactaattcttggcagggcacagtggctcatgcctgtaatcccagcactttgggaggccgaggcgggtggatcacgaagtcaggagatcgagaccatggtgaaaccctgtctctactaaaaatacaaaaaattagccaggcgcggtggcgggcacctgtagtcccagttacttgggaggttgaggcaggagaatggcgtgaaccaggaagcggagcttgcaatgagccgagatcgagtcactgcactccagcctgggcgacagagcaagactccgtctcaaaaaaaaaaaaattaaaataaaaaaaaacctcattctttaaccatgtcttgaaatgtgacagaagaaaacactttaaattgcaaacataccccaaatttttctcttctcacgaaatgtgactatcttttaatatctcacacatctcacagtcatctatggcttttggtcatattcattaccacagtatattattacaccctctttgacgacacttatgccactggtggtctttggtcagaagtcactcataagaacatgagatcacctttggtatttagaatagatgaaaattcatgatccagataaaaactaagaatataagcatgaaaagtaaaatctacatgaggaaaaatatgcctgacatccacatggcaacactgactcacagtgaccaccggataacatggtaacattatcaacttgatctaatacatgatgttaatgggaggttgtaatgtagcttcttcattaaaaaataataattgttagtatgcagttgttataaacagttaataagcttatttctaaaatacatgaacagaagtatttgttgccaagaaaccgcattagtgtttttagtcaggtatactcatacaaagttaaaaacgaagtgagacattacattcagttgtgaataacagcaaatgcttgaaatttcctgataagagcaaggtggctcttctcacataaaagcccttggtgagaccaatcactgcacaatgcagcagaggaacaagctcccatctagttggtttaatcaagaacaggctcgctaatccgtagaaacaacaatgcttgcaatacaaagtagacctcttaaaccaactcaatctatagaagagttgggcatcagtgagtatttccagccataacaacatttattagttctctggtaaacattttaacatttctgaagaaacagcaaagtgggcatgtatctttaatgtggagcactggggacatatctggagacctacaactctgaggaacagagacaagtgatttgggggatattctcgattaacaagccaaagaatcaggaaaatgggctggaagcgggtagccacacacctctctccctgtgtggggcctctaatatgtgactgatgccttccttttctgtgcctttgaaatctcatgcaagattggctataggtgaattgtattacgaaaccatccaagttcttctagattttattgtcctatcgcaagtctctcttctcaattcaaaaagcagttatccagaggttctttcaccactctcttttcttgtgtttcaaaggaagtgggacaacagaaagcttctcccgttgcttccactaaaaggatttctcatctattaatggtatgagttctttcatgttctcgacatgaactggcacgaataaaggctttgccacattgcttgcattgatagggtttctctccagtgtgagtcctttcatgatatcgaatgtaattggaaataaaggccttaccacagtgcttacattcatagggtttctctccagtgtgagtcctttcatgatatcgaatggaactggaacaagtgaaggctttgccacataccttacactcatatggcttatctccagtgtgtgtcctttcatgtatatgcaaggaagagaaatacctgaatgcttttccacattgcttacattcatggggcttctctccagtgtgcgtcctttcatgtatacgcaaggaagaaaaatacttgaatacttttccacattccttacattcatggggtttctctccactgtgcgtcctttcatgaatttgaagttgtgaagcacatctaaagcctttcccacactgcttacatccatagggtttatcctcagtgtgtgtcttttcatgcctttgaaggtccgaggtacatctgaaggctttaccacattgcctacattcatagggtttctctccagtgtgagtccttccatgcttttgaaggtgtgagccacatctaaaggctttcccacactgcttacattcatagggtttctctccagtgtgagtcatcttatgatactgaatggaactgaaagaaatgaagactttcccacattgcttacactcatagggtttttctccagtgtgagaccttttatgtctacgaatttcactaggaaaactgaatgcattcccacattctttacattcatcggcattcactcctgtgtgagttctttcatgtactggaagggtagtggaacgagtaaaggccttaccacattgtttacacttatatggtttcacaccagtgtgaattcgttcatggataagacataaattgagaaaatagaaggctttcccacaaaacttacatttataaggtccatctccactgtgcattaccctgtgtctttgaatgcatgaatgggaaatgaaggtttctgtacattctttaccatcatagggtttctctttagtgcaagctttatcatgtgattgaaaggagtcaagataactgaaggctttcttacattccttatttctatatggattctctccatattcctgatactcagatgacttgtgtccagtgtcagctctgatatgcgtattaagagatgaatgacccgtgccaacttctccacacacactgctttcacatggtgttattccaggaagagttttcctgttcagcatgtcatctgcaatctggttgaagctttctccacagtgatgactttctttactttcacagagtttctctctcataagacttcagtgaaaaatgagaagcacattattaacggtttgattaaaagtgacttatagggccgggcacagtggctcactcctgtaatcccagcactttgggaggctgaggtgggcagatcacctgaggtcaggagtttgagaccatcctggccaacatggtgaaaccccgtctctactaaaaatgcaaaaattagctgggcgtggtggcaggtgcctgtaatcccagctactcgggagcctgagttgggagaatcgcctgaaccccagaggcagaggttgcagtgagctgagattgcgccattgtgctctagcctgggtgacaagggcgaaactctgtctcaaaaaaaaataaaaaaataaaaaagtgatctatattggctgggtatggtgggtcacgcctgtaatcccagcaccatgggaggttgaggcgggcagatggcttgaggccaggagtttgagatcagcctggccaacatggcgaaaccctgtctctactaaaaatacaaaaattggctaggtgtgacggcgtgcgcttgtaatcccaactacttgggatgctaaggcacgagaatacctcgaacccaagcagtggcagttgcagtgagctaaaaccacaccactccactcccgcctgggtgacacagcgagactcttgtctcaaaaaagaagaaaaaaacatgatttatatcattaacaactattgcacttgcattgttaacactgcccggcaaagtgtcagctttctgctctgtctgaatcatttgaatattaatggactatatgctctacaagatggtctgggtatatatatttttttaaaattagtatttctatggggctttgtaatcctattttcaagtaaactattttacaaatactaaacatgtgcgtctttttttttgagttggggtctcaactcaccctgttgtccaaattggagtgtagtggtaccaacatggctcactgcagcctcaaactcctggcctccagcaatcctttggtctgaaagccccaaaggactggcatttgggggtatgcgcaacagtgcccagcccagcgtatgttacatttaaacatatgtttttaggaaaactttctatgaatacataaatttgatactgggcttatttcttttgcttctttttaacattttctcactttttttttttttttgagacggagtctcgctctgtcacccaggctggagtgcagtggtgcgatctcggctcactgcaagctctgcctcccagattcaagcaattctcctgcctcagcctcccaagtagctgggactacaggcatgtgccaccacgcccagctaatttttttgtatttttagtagagacagggtttcaccatattggccgggctggtctcgaactcctgaccttgggattcacccacctcgacctcccaaagtgctgggattacaggcgtgagccactgtacccggcctattttctcacattttaagattttctagaggcattgccttgtcttgcgagagaaaattaccttagatttctcctgggatttttgtactcatcttcaatgttctgaactttccatgtttttcctaaaacacagacccggagaaaacacagatccagaattagtatgaatttatttaaaaatcattagattctgtattcatggtacatggtagccatgcctgatttattcatcaaagtattttttgtccatgttccaaatcaatgaacagcattgatgagctagaagcatttgttctctaattcactgggaagtaatattgtcattcttacctacagaggtcaggttcttgaaggtttcctgcatcacatccctgtagagattcttctgggaaggatccagcaaagcccactcctcctgggtgaagctgacagccacatcctcaaaggccactgaatcctgaaacatctcacatatataaaagaggacaggtaagactaacagccctggaggcctatactttattcctaagaagttctcatgatactgtggactccaaacatttatcccatgacttggtcatcacacctcttactttctgtctatactcacgtcctcccacaaaccaaccctttttttgttaagagagagggtctttggccagtcgcggtggctcacgcctgtaatcccagcactttgggaggctgaggcaggcagatcacttgaggtcaggagtttgagaccagcctggccaacatggagaaacccgtccctactaaaaatataaaaatcagccaggcgtggtggtgggtgcctgtagtcccagctactcgggaggctgaggtaggagaattacttgaacccaggaggtagaggttacagtgggccgagatcgcgtcactgcactccggcctgggcgacaaagcaatactccatctcaaaaaaataataataaaataaataggccaggcgcagtggctcatgcctataatcccagcactttgggaggccaaggtgggcggatcacctgaggtcgggagttcgaaaccagcctgaccaacatggagaaaccctgtctctattaaaaaaaaaaatacacaattagctgggcatgttggcacatgcctgtaatcccagctacttgggaggctgaggcaggagaatcacttgaacccgggaggcagagattgcggtgagctgagattgcaccattgcactccagcctgggcaacaagagtgaaactccgtctcgaaaaaataaaataaaataaaataaataaaatctatactaatcaagagaaaatggtattaacagatggaaagatagactaatggaaaacagcagattctgaaaatagtgaaaccacgacaaagcaggtatcaccagccaattatgcaagtggtcctcacttaccagaaggaacagggacagatggttacctacaggagaacaaacaatctttgaagcccatcatctccatatgaattaattctagagttgcctgttaccgtgacttcttatgttaccttaccatgcattttcattatgggtttcactttcttataacagaagaaacccgtactcaagccgtgtgtagtggctcatgcctgtaatcccagcactttgggaggccaaggcaggccaatcacttcaggtgaggagttcaagaccagtctggccaacatggtgaaactccctctctactaaaaaacacaaaaattagccgggtgtgtgcgtgcctgtaatcccagctactcgggaggctgaggcaggagaatcgcttgaactcgggaagcggcggttgcagtgagctgagagagcgccacttcactccagcctgggcgacagaaagagactgtctcagaaaaaaaaaaaaaaaagaagaagaagaaagctgcacttgacctcaacagtttccagttatccacctcctcccagttcctgcatgtgctcaacccacatatgtgacttacacagctgcctcctggtgacgacctcactgtggaaaagctagacagaccaacttgacttgccccactgacccttatacccacgtggatggcacagaccacctgttaatcacagcctgacttcacagaactagcacctgcttgctccaaatctatcagaaacaactccctaagagaaacctccttgggcattgccctggaccccaagaaaaactctggcccaaaagtccctgtctgtctttctccccacctgctggttgaatgtgcatcctggatgttccccccactctgtgttgccctgcaaggtgtgctgccctcatctgtctgggatgtgataatgcactgttatgtcatggctttatggctttgttgagatgactctgctgtggctcacttcacctacacctttcccttaatagcaacatccaactggctgaccagctatgtgtctccaaataatggaagctgggactgggggagaaaaactgagcatcccaaggggttggctatctagatgaagagtgtaccaggagtctcctcccatttgggaaattcagttgctcctttgggagatcccacaccctgcctcaggctatcctctgggaggactgacacaggggctgatattcagtaggccaggagagatgggagctgtgggcattttggttcagccccaggcggttctgaaacccaggaccaggaaaagatagattgggactcctgaagacacatcaccctgtaaagttttcaaaaaggaaacaggccaggcacggtggctcacgcctgtaaaattccagcactttgggaggctgaggcaggcagatcatttgagctcaggagttcgagaccagcctgaccaacatggtgaaaccccatctctacttaaaatacatggggtatggtggcgcatacctgtaaacccagctactcgggagactgagggcaggagaatcacctgaacctgggaggcggaggttgcagtgagccaagaccacgccacttcaattcagcctgggttacaaagagagactttctctcaaaaaaaaaaaaaaaaaaggaaacaacccaaagacattctgagatggtgtctgtgccttacgaagataagaggagaggaacagaggtttttcactggagtatcaagtggttattctctattctatgtgaaatgttcagaaacagaacacaaatattttaaaaaaagttatccatgaccttgtgaaaagatgataaaccactaaaatactgcatctatgtgaaagaaaggatgaagaaatatactctacaataaagaaagttgatacaggaggctgaggcaggagaatcacttgaacccgggaggcagaggttgcaatgagccaagatcatgccattgcattccagcctgggcaacaagagcgaaactccgtctcaaaaaaaaaagaaagttgataatactgtgagttggagaaggggagttaatgtttggagatgcggaaaagtaattgaaaatttaagatgttactgcaaactgctgaagagttagggcggggtagcagggtggaggatttgagacccatacattaggaaaatgcaggaggaagccagtccctatagacagtgtgaaaaaatttaaagcagcagcaattagactgaagtgtgtttagtgctataagaaactacctaaggacaccaaaatcaaactcaaattgaggcaggaaaatagggtctggacgcagggaacataaggcctattcaaacttcagctatgaaaggaaatacctactccatagggcgtaagccaagtaaatgattttataaccttacttcatcctctccttttacatagagtataccccaagtaaccaatggaatcctccagggggtatttaaactcccaaaaattctgtaacggggcctttgagcccctgtgctcagccccgcttgcacactgtggagtgttaaatcccttcattccttccttgctttgtgcgttttgtccaattctttgttcaagacgccaagaacctggaccccctccaccgttaacaaaatgcaattcttcttaaaactttctggtaccaaaaccacaaatcatgactgggcgtttctcactcatgaatcgctgtttgctcaaactctttaaatttttttttttttttgagatggaatctcgctctgtcccctaggttggagtgcagtggcgtgatctcggctcactgcaaccttcgtctcctggggtcatgcgattctcctgcttcagcctcctgagtagcggggactacaggcgcatgccaccatgcccggctaattttttgtatttttagtagagacggggtttcactgtgttagcctggatggtctcgatctcctgacttcgtgatccgcaagcctcggcctcccaaagtgctgggattacaagcatggtccaccgcgcccggcccaaactctttaacagaaaaaaaaatccgcaggattcccccatgaccctcccgtggtccccgcaaaatctgaagagacgcggggctgcaggcgcggagctgcccagagagggctccagggtcggggcccacagtcgcccgcgcaggaacagaacaggaggacgcccggggtcccggctgccggcccagccgcaccctgcggccgaggggacgcagggacgagctgagacagagggattcgggtcccagatccaggaggcgcggcgaggaggcccagatcccaccacagccgcttccggccggttccacccagcccctcccccgtctggggactccggccccatacactcaccatttcccggcttctgggtgtcccggtgtcctctctagggctcccgtgaatagtgcgggtcacggtgcaggcggcagagcgacagaagttgtggcagagggacccggggcctctcggagtaggaaatctggtatcccgacaacaacctgcatagcaacaaaagtagaagctggaatgggcctcctccttccggacggaccgttggccgggctccgccccggcgcttctgattggacaaggtacaaggccccgccccctcagaactgagtgacggcagaagccctgggtaacgagccctgcaaagccggactgatcggttctagccacagcttctctctaagggacaactccttccctgagccctggtcattggatattttcttttcagccaaatttgctcctgatttttacacagggcactatcttcttcctcattcaatgggctgtcagtgcttcttcgtcctgcacagggttgtaagtgtgtgcagggaattccagactgagtgtccaatggagcgatgtgctgacctcagagcaggaaggggagcccagatcaggccaggcacgactgcaccaagaaggagaggcagttgtccttcaggggcccggaattagggatgagacatggccaaggctttcacacatctcaccccacctcacagtgtggaaactctccctccttccagaccttcatcttcatcggcagaaaactctcacttggtgattttaagcttctgacctaaataaactgtcaactgcataagccccttctccaggagaggtcccaaacagttatttccctgaacttgatctttacggattttcttcagatatgcaaattacagtctgaccccagggactctatgcatgtcaaacccaaaacactgctcccgaaaaccgccccagattccagatgtacagccgcagaaaggacagaactcctgaagtgcacctgcacgtgggtctcctgctttccagggcgctgcagcatgtcagaacccacactctttctggatctgctctgagcagctgcaagccacctgcaggggagggcggctgcccaggaagcacccagaactccacttcactccttggcaggatccatactagcctcagcgtcccgtccctggcgtcggtctctgctgccccctgcaggttattcacctgcttctcacatcattcatcagtttccatgagacaaacatcctcaatcccactgcgagaataacacacgagcaaagctctcctccagtgtgtatgtataaagtcgaggaggaagtgtccaagattatttaactgcatgaaagtgaggcagtagtggctgggcgctgtggctcaagcctgtaatcccagcactttgggagggcgaggtggctggatcacctgagatcaggagttggagaccagcgtgaccaacatggtgaaatcccgtctctactaaaaatacaaaaattagccgggtgtggtagagcccacctgtaatcccagctactcgggagactgaggcagaagaatcgtttgtatcaaagaggctgaggttgcagagagccgagattgcaccactgcactacagcctgggcaatagagcgagactctgtctcaaaacaaaacaaaaaaacacacaaatgtttagtcatgttacttatttctggtttccagcctgactttataacattcctgactctgggactctccagctctccagaattatgctttgaagaaaaaacaagatagagcacagggcccacatgtctcttataaactgtgaaccaaaatattacatagcagccatctgtcagaactgcttccaggctattgtcctcagtcacaatcctaaatcaaactcactttctttaacaaatttaattttttttcttcagtccacatgagtaatctaaaagaaacacatagacagaagaatctctttattatcatctttctaccaagtcaacatcaagcattaaaaaaatgtaaaacaaagtgaaaaccatccttctctgattcatcgtagacccagaatctgccagtcaccaacacctatcttcattttctctattacggccaacttttatctaagagatatcataggggcatatttaatagagtttgtcattttgtgttttatgaattttagaggtttttttgttttgttttgttttgaacttttatttgcattttcttttggctgaatttgtttgtctcttaagtttatgtttcttctggggtatctttttcttccgtgcatcctccttttctgcttttggaacaaggtgtttcttttcactaagcatcatctggatgtggcaggggagtttgtggatgggttcatctgcccatgagttctgtaagtcaggtggtacattatgggtgccttttccctggatgtgctcaataaccagggaatctacatctatacccttaagttcagcataactctgcacttgtaagcaaatttcagtaccttttcggggccactgatggtgagtccagccccaatgtctgtcttgcgtacagcgaccaactccactttctaagactgaaatggtacacataatttctgtaaaagaaaatatttcagatacttggtggcttttcatataggcatacctgtgatggcctgagcaccttcacagtttacagtgaacatgagggtttcatccttctaacatgcacgacttcgtgggattttctgggtcatagtgaataatgttcatagatcaactcaggccacacaagaggacaggttttctttggtctttaaaaggaactgattaaagaaaaaaaaaaaaaaaaggtggaagccaggcacagcagctggtacctgtagtgacagctacttggcaggctgaggtagaaggattgtgagcccaggaatatgaagctctcatgcactaagatcacacttgtgaatatcactgcactccagccgggtccaaacagcaagaccaactctctaaaaaaaaattacataataaaataatttaaaaaaaagtttgtggttagaaaaaagtttttatttaagacattcattaaagaaaaaagtactttgagaagagattagggccaggcgtggtgcctataatcccagcactttgggagcccaaggtggcagatcatgaggtcaagagattgagaccatcctggccaacatggtgaaaccccatctctactaaaaatacaaaaattagctgggcgtggtggcgcatgcctgtagtcccagctactcaggaggctgaggcaggagaatctcttgaacctgggaggcggaggttgcagtgagccaagattgcaccactgcactccagcctggccacagaacaagactctgtctcaaaaaaaaaaaaagatattaggcctggcgcagtagctcacacctgtaagcccagcattttgggaggctgaggcaggtgggtcacttgaggtcaggagttcaagaccagcttggccaacatggagaaacccgtctctactaaaaatacaaaaatggccgggcgcagtggctaacgcctgtaatcccagcactttgggaggccaaggcaggtggatcacctgaggtcagaagttcgagaccagcctggtcaacatggtgaaaccctgtctctactaaaaatacaaaaattagctgggtgtgggggcacacgcctatagtcccagctactcaggaggctgagaaaggagaatcgcttgaacctgggagttggaggctgcagtgagccgacagcacaccactgcactccaacctggagcaagactctgtatcaaaaaaaaaaaaaaaaaaaatttgaaggctggaaaaagattagaaggccgggtgcagtggctcacacctgtaatcccagcactttgggagacactggtgtgggtcacttgaggtcaggagtttaagaccagtctgaccaacatggtgaaatcctgtctctactaaaaatataaaaaattagcctagcgtggtggtgggtgcccgtaatcccagctacccgggaagccaggaggtggaagttgcactgagccgagctcacaccaacacactccagcctgggcaacagagtgagactctgtctcaaaaaaaaaaaaaaaaaaaaaaaaaaaaaaaaaaaagagtttagaggctgggcatggtggctcatgcctgtaaagccagctactcgggagactgaggcagaagaatcgcttgaacccaggaggcagaggttgcagtgggctgagaatgtgcaactgcactccagcctgggagacagagcccgactctgtctcaaaaaaaaaaaaaaagaaaactcgtgagaacgaatggcataaaatacgtagtgtacccgatagccagccatttattataggatatttttgaataggaactttagccttttgttttgataaagctttctgaggcagtgagtctgacaatggcacttccgttatccctttagtgagtttcttaaaatgagggcttgccacttaggtattgggctttcaataggagggaaaagatttttctgaccttcctgtatatatatacctgccactttgctgggctaaccttattattattattattattttgagacggagtctcactctgtcacccaggctggagtgcagtggcgcaatcttagctcactgcaacctccacctcctgtattcaagcaattctcctgcctcagcctcctgagtagctgggactacaggcgccaccacacctggctaatttttgtattttttagtagagatggggtttcaccatattgaccaggctggtctcgaactactgacctcgtggtccgcctgcctcggcctcccaaagtgctgggattataggcatgagccactgcacccggccaaacctcgtattttttttatgacagaactgtcttaaggtcttactggaggtgtgtctctcttaagagttatttccaactctgtgtcctaggtatctgagtgaggccccagctaaactactcccaaaaatttttgctcctgggctactggcatttatttctgaatgctgtcaaatgacagtgactgcagaagcttcagaataattttgcgatggttcccatgatttgagggaaacacatttttaccatgattggattcggtggcttctaggaatcttatgtgaattaagcaatcttctcgccttggcctttcgaagtgttggagctacagggtttttctccagtgtgagtcctttcatggattttaacgctcgaggcacatccaaaggctttaccacattgtttacattcatagggtttctctccagtgtgagtccttccatgtgttcgaaggtgcgaggcagatctgaaggctttcccacattgcttacattcatagggcttctctccagtgtgagttctttcatgatatcgaacggaattgaaagaaacaaaggctttcccacactgtttacattcatacggcttctccccagtgtgagttattttatgtgcatggaggcatgtggaactatggaatgctttcccacactcactgcattcataaggcttctctccagtgtgagttctttcatgtattcgaaggctaccagaatgactaaaggctttaccacactgtttacattcatatggtttctctccagtgtgagttcgtttgtggataagatacaaactgagacacatcaaggctttcccacaaaagttacatttgtagggtccatctccactgtgcattatcctgtgtcttcgaatgcttgaacgggaaataaagctttttccacattcctcacaatcataaggtttccccccagtgtgagcccattcatgtgttcgaaagtaggggagatcactgaaggctttcttacagtatgtacatttatatggcttctgtccatattcctgatactcatatggcttgtgtccagtgtcagctctgtggtgcctattaagggatgcatgacccacgctgacttctccacatgattttactcggggagttttcttcttcagcatgtcatctggaacctgggtcaaaatttctccatgctgatgatctttcttactttctaagagtctctctcccataagacctctgtgaacaatgagaagtatatcataatgggttcctttatcactgatttgatattcattaacaagtcattgcacttgtatttctaacactgtacagcaatgtgtaggctttctgccctgtctgaacatgaacagaccacacatgctctacaagatggcccagctatacctgttatcaagaaagataatattgatatagggcttcttagtactttttaaacattttttgagatagggtctcactctgtcatccaggctggagtgcggtggtgagatctcagctcactgcaacctccatctcccgatctgaagccgtcctgccacttcagcctcctgattacctgaggctacaagcataccatcgtgcctggctaatttttgtatatttgctagagatggggttttgtcacatttccctggctggtctcaaactcctagactcaagcaatctgcccacctcagcctcttaaagcattaggattacaggcatacacctgggcgcccggccaacactattttcaggtaaactattttacaagtactaactgtctttgtcaattttattgcttctgagtcagggtcttgccctttaacccaggctagagtgtaatggtgctatcatggccgagtgtagcctcaaactcttcagctcaagcaatctctgacctgaacctcccaaagggctggattataggcttaagccaggatgttcagcctatgtcacacttaaatatatgtttttagagattttttttttttttgagacggagtctcgctcagtcgcccaggatggagtgcagtggcatgatctcggctcactgcaatctctgcctcccgggttcatgccattctcctgcctcagcctcccaagtagctgggactacaggtgcccgccatcacgcccggctaatttttttggatttttagtagagacagggtttcaccatgttagccaggatggtttcgatctcctgacctcgtgatccgcctgcctcagcctcccaaagtgctgggattacaggcgtgagccaccacagccggccctagagaaaattttgtaagaataaatacagtggaacttggcttatttcttgtttgcttctttttaacattttcttccattctatgattgtctagagagacatcactttctcttgtgaatgcgaattaccttaggtttctcctgggatttttgtactcatcttcaattttctgatctttccatttttttcctaaaatacagaaccagaaaaatagtcctgaattagcaaaattatgaaaaaagtactagattctaagttcatggtacactgcagccttgcagcatttattcacattcctattccctgtcctcactattccctgtccacactccaaatcactcaacactactgacaagctagaaacacttgttctctaattcactgaggaaagtaatattgttacccttacctacagaagccaggttcctgaaggtttcctgcatcacatctctgtagagattcttctgggaaggatccagcaaagcccactcctcctgggtgaagttcacatctacatcctcaaagaccactgaatcctgaaacatcccacatgtgtaaagaaacatgggtgagactgacagcactgggttcctatactctattcctacaaagtttccatggtgctatggactccaaacatttattccatgatctggtcatcagactttttactctgtcaacactcactcttccataaagaaattctttttttttaattattattattttttgagacagaatctcattctgtcacccaagtgggagtgcagtggcatgatcttggctcactgcaacctccgcctcccaggttcaaatgattctcatgcttcagcctcccaagtagctgagattataggcgcctgccaccacgcacaactaatttttgtatttttagtagagatggggttttaccatgttggccagactggtctccaactcctgaccacaagtgatccaccagccttggcctcccaaagtgctgggattacaggcatgagccaccaagcctggctgaggccctaccaatctgactgataagagtcataactaactaaaacaaaaaatcaagagcagaaacctttcttggaaactgtgcttgggtagaaaagcctgaattataactgatgaattgctggaggttgaatggcaacaagattggagaggcaaaaactccagggtgtccagtctcaacaaaaaggcaaatatttatcaaatgtaaaaacttttgtgtgaaatggtgtaagagaacaccatcaagagagaaaatgaaccccatgtgctctgtccaaaggatggtaaatggctcagcccctatggaatagtatgacggtgcctgaaaaaaataatataactaccattttttttttttttttgagatagagtctcactctgtcacacaggctggagtgcagtggcacaatcttggctcactgcaacctcagcctcccaggttcaagcaattttctgcctcagcctcccaagtagctgggattacaggcgcccgccaccatgcctggctaatttttgtattttttttagtagagacagggtttcaccgtcttggccaggctggttttgaactcctgaccttgtgatccacctgtctcggcctcccaaagtgttgggattacaggcatgagccactgcgcctggccaaaattaacatatctttcagcaatctacttttgtgtctacttattttcaattaaaaaaaaattgaaatccagatcttgaagacacatttgaaaaccactgttaacaatagccaactttgggaggccaaggcaggtggatcacgaggtcaggagatcaagaccattctggccaacatagtgaaaccccgtctcttctaaaaatacaaaaattagctggtgtggtggcggtggcgtatgcctgtaatcccagctactcaggaggctgaggcaggagaatcacttgaacaagggagtcggaggttgcagtgagctgagatctcaccactgcactccagcctggcgacagagcaagactcagtctcaaaaaaaaaaaaaaaaaaaaatcagtagccaagagctgcatcaatccacctgtccattcattgattgctgaatgaataacaaaaatgtgataggtatatatatatatatgcaatggaatattatttaatcttttaaaataacaacctgtccgttgttacaacaagcatgaaaatttaggatactatgctaacagccaaggtagtcaccaaaagaaaaatacagtatgattaaagttatgtagagttgtctaactaaatcaactgtacagttaaaattgcataagctggtaaaatttaagttttttactttataattattaaaattaataaaataccaagtaaaaacctaattgattaaaaggtgggcaaagtatttcagtgacgtttctcaaagatacatacaagtgacaagtaagcacgtgaaaaagggttcaacatcaggaatcattcggcagaagtatttttttttttttcagacggagtttcgctcttgttgcccaggctggagtgcaatggcgcgctcttggctcactgcaacctctgcctcccagcttcaagcaattctcctgcctcagcctcccgagtagatgggattacaggcatgcaccaacactgcgggctaattttgtattttcagtagagacagggtttctccatgttggtcaggctagtcttgaactgctgacatcaggtgatttgctcactgtgacctcccaaagtgctgggattacaggtgtgagccaccacgcccggcccgacctaagtattttacacaacaaagtttccggtggttattgagtgctttcctctcatgaaaagtattcataaacaaaatagaaaagtttccaatgcagccattcatggctctgtggaaaaatgaaaaacaaaatactacagctctttcaaatacatcatggtggacacactgatgaagatgtcgattagagaggggagatgggtgctttggaatgtgggaagggaatcagaaatgtaaggatttgttgttgtccccatgaaaaggtagctgtgggggtctcaaggactccctctttgacaaggctttgaccttgtcctacaaaacccagttatagcaaagatccttctaagggagttcagagaaaccccaccctggcccctccaaacgtgatacccaatgaagttctgttacccctattcataactcatcagctttctcttctgtaacccttgatacctcaccaagttccatcctctccctcaatttacccttgaactataggttcaatactgttgttgctgcatgcaaggttgaggtcaatctctctcccatattacagttctcatgacccacatcacaactgtcctgaataaagccttctttgacatttttaacacgatttcagtacaatctttttttacaagggacagggacttagacttgaaaccctgcttcacaagtctggaatgcataggggataatatgctctctccctgtgggaaggaaggagggtgtcctgagagtatctcccactcacatatccagaactctgggtcagacttctctcctcatgaccactccttgttgtcactccataaactgggtgagatgggggactgtggatacaccattacccagacagtgttctacggtggagctcgcctcctgcagtgatgggacacaatgcctgggagtcctgtttgccaattcagcccttaccttgtgtcataaaggagactgaggttccaactgagatggatatatgtgaggaccaggtgtagaattttcaagtttttcttccatttggtgaatactctttgcaatttatttcttctttttttttttaagcctatagcaagcagtattctcatgcattctataaaccatgcagtaaccaggcttgaatctgctcagctgctaagatcagctatactcttgtatttcttttttttttttttttcttttgtctgagacagagtctcactctgtcatccaggctggagtgcagtagtgcaatcacagctcactgcagactcaacctctggggtcaagcaatcctcccaccacagccttctgagtacctgggctcactggagcatgccaccacacctgggtaatttttttttttttttttttttgagacggagtctcgctctgtcgcccaggctggagtgcagtggcacgatctcggctcactgcaagctctgcctcctgggttaacgcctttctcctgcctcagcctcccgagtagctgggactacaggccccgccaccacgcccggctaattttttgtatttttagtagagacggggtttcaccgtgttagccaagatggtctcggtctcctgacctcgtgatccgcccgcctcggccgcccaaagtgctgggattatagatgtgagccaccgcgcctggccagttttttttattttttgtagagacatggtctcactatgcttcccaggttggtcttaaactcctaggctcaagagatccccttacctcagccttccaagttctgggattccagatgtgaaccactaaccttgaccatactcctgtatttcttcattgtgtctttcaaaacagaaaagcttaaattttaatgtagtcaaaattacatactttttctctgttcctagtgtttctcttgtcatattatagcctcttcttcctaaacctaagatcatgaatatttttgggtggcacattctgtagcaacaagagggtgaggttctcctttgttcccagaggagaatgagactggtgtattctgcaggctaataaggaaatgaaactcactatactatggaggataaaagtatataaatttacactataacagtataatgccatataggctaataccgtttatatgtggcacttatatatcatatacacgttacatgtaatatttaccaattacctaccataactaaaccatatactgtatataaatgcaacatatgtacatgtatatgtgtatatatatacacacacactatatcctgtactagataatgctagattctattaaaatactgtacatgaatatctcctttaaatttcaaaagaaaacacctcaccaatatattggaaaagagaatcctataacaatatcatacccgtgatgaagtggcattcaattcaggaaagcaatgctgctctcacctctgaaaatccattcatgcaatacaccataatagtataggatcaacagcaaacaacacaagaacatcataatagatgcagaaaaagcatatgacaaacctcaacatttcttcatgataaaaacactcggccgggtgcagtggctcacacctgtaatcccaccactttgggatgccaaggcgggaggatcacaaggtcaagagctcgagacaagcctggccagcacggtaaaacctcgtctctactaaaaatacaaaaaattagctgggcgtggtagcatgcgcctgtaatcccagctacccaggaggctgaggtaggagaatcgcttgaacccaggaggcagaggttgcagtgggccgagatcatgccattgcacatcccagcctggatgacggagcgagactccatcttaaaaaaaaaaacaacaacaactcaataaactaataatacaaagtaacttccttaacttactataaggtatatataaaaaatgcaaaactaccctcattcgtgatggtgaaggactaactgctttctcccaaagatgagacacagacaaggatgtctgctctcatgccttctactcagcttgagaaaggagatgctactaggccaaccaggtcagaaaacaaaagcctaggcgggacgcggtggctcacgcctgtaatcctagcactttgggaggccgaggtgggtggatcacgaggtcaggagttcaagaccaacctggccaagatgatgaaacccgtctctactaaaaatacaaaaattagccaggtgcggtggcaggagcctgtaatcccagctacttggaaggctgaggcagaaaaatcacttgaacttcgggggagaagttgcagtgagcctagaatgcgccactgcactctagcctgggcgacagagtgagactccatctcaaaaaaaaaaaaaaaaagaaaagccctccagatttatagtaaagacacatgcacggctgggtgcagtagttcatgcctgtaatccggcattttgggaagccaaggcgggtggatcacctgaggtcaggagttcaagactagcctggccaacataacaaaaccctgtctctactaaaaatacaaaaattgccgggtatggtggcgcaggtctgtaattccagctacttgggaggctgaggcaggagaatcgcttgaacctgggagggggaggtcgcagtgagctgagattgtgccagtgcactccagcctgggtgacagagggagtctctgtgtcaaaaaaaaaaaaaaatacatgcagtgattctggcaggcatatagactgtcactgcccataccggtgtacaaactgaggcagaaatacaaaaaggcaaaagacttatgttagttttatatttcttttttttttttttttttttgagacggagtcttgctctgtcccccaggctggagtgcagtggggtgatctcagctcactgcaagctctccctcccgggttcacgccattctcctgcctcagcctcccgagtagctgggactacaggcacctgccgccatgtccggctaattttttgtatttttagtagagacggggttttaccatgttagccaggatggtctcaatctcctgaccttgtgatccacccgcctcagcctcccaaagtgctgggattataggcgtgagccaccccgcccagcccttacctatattcttttgtaaaatattgaaaatgcctgaacagagccaggaagggcctcttttctcttgatcttcattatagattaactttcctcttacctttctcacacaaagacttcatggccatcacagtgtcttaagctggaatgtcaaatttgataatggctcactgcagcatcaaactcctggggtccagtgatcctcctgcctcagtgtcccttgtatcaggaactacaggtgggtgcaaccacacctgtctaatttttctatttttcttttctagacatgggtcttgtattaccaaggctggtctccaactcctggtctcaagcaatcatcctgcctcagcctcacaaagctgggattacaggtgtgggacactgcactaggtcaagagtttaacttttagctccggagttctaagcccatttccctagagtctgtattttcttgaatggcaattctcagattttcacttaaataatctccttataataggaatctgatcatttcaatcatttaaggtagaaaaatccaaacaaggcgactacatcactgtaaccaataaagtattttttgatttttattctaatgcaccatataaaagcctatccttcaacctgtaaactaaaaataaaaacctaagctccccatcccaccccaatcaagtcaactgagtggctctttaccaaggggaggccccccaaaaacctgaaagttcccagttacattagtaagggagatcagacactccatactcccttctggagtttagacacagcaactgacccacattcatattaaaatagacataagacctgcaaagaggccgggcacagtggctcagtcctgtaatcctagcactttgggaggcggagggaggcggaggcaggcggattatttgaggtcaggagtttgagaccagcttggccaacatggtgaaaccccatctctactaaaaatacagaaattagccgggtatggtggcgtgcacctgtaattccagctacttgggaggctgaggcaggagaattgcttgaacctaggaggcggaggttgccgtaagccgagattgcgccactgcactccagcctgggcgagagtgaggctccatctcaaaaaaaaaaaaaaacctgcaaagaaaccctttgtaccaataaatactaaattgcaaacaagacctaaggccatgcaaggcaagggtaaagtcacgccttagaattcataaaatctagtgaaacatatctgttttttggtggggatggaatcacgtggcaggtaacagactcccttcacttaaacattccttcctacccctttcaaattttagacacaacttcacactctcagccaactgccaactacagaatccctcaaccacctgtgccttctaagccccgcttctacgtgtcctgccctgtcagccttccatgccttgattgatcttttccctgcaattcctgtctcgctgaaatgaataaaaccaaactgccatcgaacctcctggggaccacttactcgaggctacatgcggttgtttcccttggtcacgttctctcatattcggcgtagaacatagttcaagttattttgcagagttttgctctttccgttatcaaactgcaagccatgactgggtgtttctcattcaggaaacatttctcattcatttttttcaaactcctattctgagaagcaaaactctttaatttttaagaggactcagtttagtttgttgctgttgtttttgttttgttttgtttgagacagggtctcgctcagtcgcccaggctggagtgcagtggcgcgatctcggctcactgcagtcccaatctcctccctcaagcgatcctcccacctcagccccccagtagctgggattacaggtgggcggcaccacgcccggctcattttttaaaaatttatttttaatagaaactagggtctcggtatgttgcctaggctggtctcgaatttctgggctgaagcaatccccccgcctcaacctgccaggcgtgacccactgcgcctggccttcaatttagtttttcaggaaaaaaggggggactggggaccccgcagcccaccgctcctcccacacgaaccacacacccgaggcaggattgcctccatgaccctcccgtggtctccgcacaatctggggagacgcgggactacgggcgcggagctccccagagagggctccggggccggggccagggccggggtcgcagtcgcagcgcagagacgggacaggacgcctggggtcccggctgccggcccaaccccaccctgcggccgaagggaccgagggccgagctacgccagggggactccgctctgcagacccgaagtcgctgcaggaaggcctgggtcctgctagagccggttcgagccggttcctcccggcccctcccccgtctcgggacccccggccccgcacactcaccatttcccggcttccaggtgtcctggcctcctctccacggatccctctaacagtccagtcacagtgcgggcgatggagcgacagaagctatggcggaggcacctggtccctctcggggccggaaaaccgagatcccgacctccctttggtgcaagacgcctgggagtcaggaaagcgggaatgcggcctccccttccccggatggacagttggcaggaccccgccccagcgcccctgattggatgaggctccagtccccgtcccatcggtcctgagtgacagcggaagccctgggtaacaaggcccggcagaaccgaaatgacctgttccaaccacagattatctaagcgagctccctccctgcgtcttgctctttgggtatttgcatttcagccaaatttgctccgaattgctagagggggtaccgttgtcttcctcactcaatgggctgtccctgctcctttgtcttgcacaggaaattccagactcagagtccagtggaggtgaaggaaattaaaatattttacgccaaaatatatttatttgacagattttgaaatggctgtggctcggccgcaaaaaaaagtggactggcaaagctgtctttggagggggggaatttgcatctgcagagaatctccattgatgaaaccatgccctctccccctttatttctttccctttatccaagctagaagagattgtgacctgaacacaggcagggtgcggtggttcacgcctgtaatcctagcactttgggaggccaagactggaggatcccttaaagtaaagagttaaagaccaacttggtcaacacaagaatacccctgttttgttgttttttttttttaatttttatttattaaactttaagttctagggtacatgcgcacaatgtgcaggtttgttacatatgtatacatgcgccatgttggtgtgctgtacccattaactcgtcatttacattaggtatatctcctaatgttatccctcccacatccccccaccctagacccctgtttttattatttaaaaatctttacggccgggagcggtggctcacgcctataatcccagcactttgggaggccgacgcgggcggatcacgaggtcaggaaatcaagaccatcctggctaacacggagaagccccgtctctactaaaaatacaaaaaattagtcgggtgcggtggcgggcgcctatagtcccagctactcgggaggctgaggcaggagaatggcgtgaacccgggaggcggagcttgcagtgagccgagattgcgccactgcactccagcctgggcgacagggctagactgtctcaaaaaaaaaaaagaaagaaaaagaaaaagaaaatctgtgaaggtcagaattagagcaagacccatttgggatgcctcctggagaaagggtttatgaatttttatttattattttattttattgtatttattatcattttttttgagacggagtctcgctctgtcgtccgggctggagtgcagtggcgcaatctcggctcactgcaagctccgcctcccgcccgggttcatgccattctcctgcctcaacctcccaagtagctgggactacaggcgcctgccaccacgcccggctaattttttgtatttttagtagagacggggtttcaccgtgttagccaggattgtctcgatctcctgacctcgtgatccgtccgcctcggcttcccaaagtgctgggattacaggcgtgagccaccgcgccctgcgggtttatgaatttaacagtaaatttagcttaaactgactcaagtcgagagcttcctgttggtgaaaatgaaggtcttaaaggagagaataatttctaaactgaggaggggacagaagggcatttcaaactcccagataaatccttaattttctctgcctcatcatctgggactgacccgccctggggggctccatttcagcagtcacagtttggcttccaagcttggaaatatcatttaccttctgacagagggttttccttgtgaactgtgcatgaagcaggctgcttatctgaactacttcaaatgtttgctttacttttcttttgattcctttataaaatattgctgccggctgggcgcggtggctcacgcctgtaatcccagcactttgggaggccgaggcgggcggatcacgaagtcaggagttcgagaccagcctgaccaacatggtgaaaccccgtctctactaaaaatacaaaaattagccgggcgtggtggcacacgcctgtaatcccagctactcaggaggccgaggcaggagaatcgcttgaacccgggagatggaggttgcagtgaactgagattgtgccactgaactccagctgggcgacagagcgagactccgtttcaaaaaaaaaaaaacatatatatatatatatatatatatatatatatatatatatacacacacacacttatatatgtgtttgtatatatacacatatatgtgtatatatacaaacacatatataagtatatatatacacatatatgtatatatatgtgtatatatatagctgccatataattccagcttttccatgcacttagttttattctgttgttggcttgttgttttcttgagtgaaaatgagtagactgagagataaagtatgaaaaatctttggctatccctcatcccaaatttataatctctgacgacatcaggcctctctcctcttccagtgttggcctgactagacctcaaggcagacaacctccccacctcaaaccccctccccccacccccacctcccctgaaagaagggcccactgagtacaggaagacaacagtgtcagctctggaaagcctgaaacatattctgaaataccagtatccccagggtgggggccaggctgcagtgcaaggaggaaatccggctgtggctagaatctatatttttcttttcttttcttttcttttttttttttttcgagacagggtgttactctgtcacctaggctggagtgcagtgcgctgatcatagctaactgcagcctctaccttcaaggttcaagcaatcctctttactcagcctgctaagtagctgggactatagttgcagggccaccaggctgggctaattttttttttttttcttttttttttagagatgaggtctcactacgttgctcaagctggtcttgaactcctggcctcaagcagttctcctttccagccctccccgagtcctgggattgtataggtgtgagccacatgtcgggcctagaacctttcattcaagctccactcagccaggtgttaaattctcctctcactccgcctcccagaaggcggggcccgtggcactgtccaatcaggaggggcgggggggtgtggctgtgcaaattgtccaatcaggcgcggctctgggaggaggccgcgaagctccataaaactgcgaggcgttcctttcacccgcccacagtgggtgtcaggtctatgctgctctgagaagcaccagaggtggcttcgctgcagcttctttccagctgtgacttgcaatgaacacgaaagacataaggagaaccatagacacctcagaagccaggaaatggtgagtgctggggggatgtcccgagactgtggagcaaggtgctggacaggaacctgctgtgacgggacccaggcctgtccggggcgacttcgggaccggtggactggagtccccctagcgcagccaccgcgcccgatttaagagagaattttcaatggctaaactgcacatgtacatctcctgacacagagcacctggtgacaaccatcaactgtgaaggtcagggagctgctgaagcagaagagagtccatatttcattagtttttttttttttttttggagacggagtctcgctctgtcgcccaggctggagtgcagtggcgcgatctcaactcactgcaacctctgcctctggggttcaagcaattctcctgtctcagcctcccgagtagctgggactacaggcgcacactgccacgcccagctaattttttgtattttagtagagacagagtttcaccgtgttgctcttgttgcccaggctggagtgcaatggtgtgatctcagctcacggcaacttccgcctcccaggttcaagcgattctcctgcctcagcctcctgagtagctgggattacaggcacgcgccaccacgcctggctaattttgtacttttagagacgaggtttctccatgttggtcaggctggtctcgaactcctaaccttaggtgatccgcccgcctcgccctcccaaagtgctgagattacaggcgtgagccaccgcgcccgaccttcattagtggttttatataacagtttgttaatgtcgaaataatagtttgctggcttcttcattttatcaaaggaataattatttgccagttttaaaatccacttaaaactgtcttgaaatttttctcttctactttacggtaaacacaggaggaaagcagggactctgctggattctctttcgaacactgggattgagggtgtttgcctcgtggaactgaacaatgtgggtgaaaagcaggtggaaaacttgcagggggcagcatagcctgaggccggtgatccacactgagactaatctggagcctgcaaagggagggaaagggagctcccccgattgcttcctgggcagcctgccttcccctgtaggtagtctccagctgctccgaacagctccagctccagctccaggagtgtggattctgagaagctgcagagccctggaaagcaggaacttcacaggcaaatgcacgtgcgggtttctctcctttctgaggttgtacctctagtttcccaaggtagttttccggaaaactttttgttttttgagacggagtcttgctctgtcacccaggctggagtgcagtggcgcgatctcggctcactggaacctctacctcccgggttcaagcgattcttgtgcctcagcctccccagaagctgggattataggcgcccggctaatttttgtaattttagtagagacggggtttcgccatcttggccaggctggttttgaactcctgacctcaagtgatccgcccgcctcggcctctcaaagtgttggggattacaggcatgaaccactgtgcccggccttgatttttctatgtatagagttgctgcagtcaggctgtaatttgtatatatgaagaaaatatgtaaagatcatatttagagactcatttaggtagcgttccagagaaatggtttatgagctagagaggttggaatttcaaggggcctaaattgaccacaggtgagagttttctgctggtgtaaattattaaggtattgaaggagggagcgttcccacattgtgatgctgtgacaggagggcatgttgagctcccagagttaaatccttaggtttcctgcctcatcatcagggtctaatgtactctgtggctccacttcagcagtcactgactcttaagcttgggaatatgttctaccttctgaattcatcttttcctttttaaatgttctgaagtgccctgcttatctgagctagttcaaattttcgctttacttcccttttgatttctttacagattacggaaatagaacttgtttttccatgtatttaataattttattcacttgttggcagttttttattttcttgggtgaaaatgagtagattgatttgggaggcgaaagtgggaggttcacttgaggctaggagttcaagaccagcctggacaacaaacgaaatcccgtctctacaaaaaattaaagaatttgccgggcttggtggcatgtacctgtagtctctactactcaggggactgaagcggaaggttcgcttgaacccaggagatggaggctgcagtgagctatgatcatgccattgcactctaacctgggtggcagagctagaccctgtctcaaataaataaataaagtaataaataagtaaataaagtaataaataagtaaataaagtaaaaaatagagagagataaagaggtatggtatgagaaagccttgggcacgcttcccatatcctcatcccaaatttccgatccctgggaatatcacgccctttcttctgttccagtcctgcctggaactccctgcgcacacctgtgactcctcatgcaagaggtagatgaagaaatgacccactgagtacaggaagtatctcctttggtaaacccggattaagttctgctaaaatgcaagtatctcccatctccccatcccccgcagaccaagtacagtgaaggggacgaggggaagaagtccaccctgcgtttgagggctggggccaagacccctcattcccgcttcactcatctatgcttcacatctcctgtcattcacatctgtcaagatgcagggggcagagcccgaagctgtacccaatcaggggcaccggggaggagctctgcgatcggtccaatcaggcgcgccgtcggggacgcagctgcagacgttcaaccttctcgcgggattttcatttctcgcgtctgccgtacttggtttcgcttcgctagtcccagaggcccagagtggctcgcctggagtctctgtggcgcggtttcctgtacctgccttgggatccggagggaggaagctgggacacccgggagtcaggaaatggtgagtgtgtcgggccctgcgtcccgagacagggaggaggggctggttggacgaccggaactggctgtggcgcggcccgggccttcccgtgggcgactctgggtctgcgtaccgagtccctctggcgcagctcagcccttggtaccctcggcctcagggtggggctgggccggcagccgggaccccgggcgtcctcgtcccgccctgtgccgcgattgcggccccggccccgaagacccaagtctcttcagattgtgcggggcccacgcgagggtcatggggtgggggaaatcctgacttgtgcgtggaaggagctgtggtgtatgaggttcccagttccttttctctccacagaggacacccgtttttccctgagttttctaagtgtatgggatgcagggtcccaaatcctcactctgtcccccagcctgctgtttccagggcttgcagtaaatccccaaatttcctgttctcttttcgcttttccaaacgccaacctctccccttccattcacgacattagcaaccgtttctcctatattctacatttcagatattgtgctttcattgtttatttttcaacaaagcaatggattactctttcatcaaggtttgttttctgttcatagccttgacactccgctgtaagaaacctttgtgcttgtccttttgtctcctctatgcacagatacctcatcagaatgtctttgagttgaggttcccctttggaatctttacagggtgatatgccttcagcgccccctcctatttattttttcctggttctgggtttcaaaactgtctggggctgactcaagctgcccacagctgccaagtctcttggaggatctagtgaatattgggtcttgggtgagtcttcctagaggacagttgaaatagaaggctgggagaatgccctgggactaggataaatctagcataccctgcttctaaatagccaacctctgggggcactcagcttttcctcccccaaccccagtttccatcctttggagacacactggtggtcagccaatcagatgctggtattgaggattgagaaaagaaaattttttgtgtgttttgaaagagtctcgctctgtcgcctaggctggagtgcagtgacgtgatctcggctcactgcaacctccatcttctgggttcaagcgattctcctgcctcagcctcccctgtagttgggaccacagttttgcgccaccactcccagataactttttttttttttttttttttttgagacggagtctctctgtcgcccaagctggagtgcagtggcgtgatgtcggctcactgcaacctctgcctcccggattcaagcgattctcctgcctcagcctccccagtacctgggactacaggcgcatgccaccacgcccggctaattttttgtgtttttagtagagacggagtttcaccttgttagccaggatggtcttgatctcctgacctcgcgatccgcctgccttggcctcccagagtgctgggattacaggcgtaactgtacccggcctcaaaaaaataattttcgtctgataaatgtgggtccttttaaatgaacgggcacatagagacattcaagtgatacagcaatcaccttctaactccctgaagctatgaattcatcttttgaaactgctattgccacaagtaggtataatcaacttactaatgcaacacgggaccctggaacccacaccctatagcttaacagtgcatagccacgcgcttatcaatgttacttctgtaaatcagtgagaattcctgacaaacaactttgtatcagcccacatcctgtccccctttttcagacactttgggtcatattttgtgtttcagcctctactttttaggtcgacaagggaaaagacggaaatgattcctgtcctttgtattctctcagccttgtgaagggagaaaaactatctcagcgaggtggtggaataacctgaaaaacaaaatgcactttgggtacacagtgtcgcgtaatgcagtgtctcttgggcgggtggtcactgagcatttcagtgagcactatgggggtagagggatgttccaactgatagataagatgacctctgctgacactggagtcagacgaatgtctgtattccaggtcagcactgcttctccctgggattcttgccttaacaacaagttcagcttgagtatttcatttagttgaaagtgcattttatcagtagagcttcatagagaagataatgtatttcccaagaggtagatttcagggggaaagagattagtcttatattccacattttaaaaattcttattttcaacggcttgtatctgtatttctccatattttggagtaattatctgcatgatatgtgtaggtgctgtggctttttacctaagaagcagaatctcattccagtacatttgagagtcatgatgccaaatctttgatggtctgtgtcagagacacaaagtctacaatgtgtgtgttcacagtggtgtggattttatgcctcaagtcacttagaaaagtgtcttagaaaacctggacagtgcccttgtgtcttcacaataattcttttgtgtatttatggagatgattctgtaatcttttgggacatggaccaatgtgtatctcttcatactcatattctgcaccatctgtatgtagcacgtcagacttagcggtgtgaccttaaactttttaaaagaaactggaaggtcaataaaatttaaactgctggctgggtgcggtggctcacgcctgtaatcccagcactttgggaggctgaagcaggtggatcacctgaggtcaggagtctgagaccagcctggccaacctggtgaaaactcgtctctgctaaaaatacaaaaattagccaggtgtggtggtgggcgcctataatcccaggtactcaggaggctgaggcaggagaatcacttgaacccaggaagtggaagttgcagtgagttgagatcatgctattgtgctccagcctgggtgacagagcaagactccgtctcaaaaaaaaaaagaaaaaaaatttaaactgcttaacaacaaattcttattttcttttattctttcccagatcatgtgtagtatatgtgtagtatgtttgtcagatctgtgttctgttgggtgacttgaaatggaattccagggcttaaccttgagaatattatcagggaaaagaaatgggggtggggagaaccaactctcctattatggcttcagaaaaatgaatatagtttcccaagaaagttagtagataaattggggaattacaaagattcaccaaaacatcaatttctcttgcaaggtggagaatttgtgacggtgaataactgttctgtttcctgttattggaacttagcagattctaaatcttagggaacaggacctggcaacaactaggaatcctctaataggatttttgtttactaaatgatttgttatcatagaaatagtagttaagtgacatctttgtctgaaaatagtagattcttgtgctttttctgttcagctatgatgtaaatgtgccttaattttcttccctcccataaacattaagattgattttgctggattcatcaaacatgagtcattaaacatgggtattttctttaaatatccacatgaggtatgtaaagggaagtgggtagccttgactggggtgcagaggcctgaggccagcgactccaaactgaggccaatccaaaggagtactgcataaaggaaggcaccaatcaaatataagatctgcaaagatctgaaagtttaggcagaaaagtgttttctttcataggaaggggcaaacagattagaaagaagatgaggaggaagaaggcaggatggagggtgcaaaatcagacctagatcagaacatgttttattctgaggttattctgttcttaggaagtgttgcctatttgttcaggctgagagtgggtcaaagttaagggcctggaggaaatttacaagtcaagggcttgcatctgtagttctctatattttggagtaattatctacatgatatgtgtaggttctgtggcttttcacctaagaagcagaatctcattctagtacattgaagagtcatgaagccaaatctttgatggtctgtgtcagagacacaaatttaaggaatgtttggttaacaaatgttttgttcccactgatcagtgaagacaaaactgttcagctaatgttttatgaagcaaagaatgggcatttgtagacctgatgccatggctcacgcttgtaagcccatcactttgggaggctgaggccagaggatagcttgagctcagcagtttgagaccagcctaggcaacattgccagactttgtctcaaaaaaaagaaaagataagaccgggtgcggtggctcacgcctgaaatcccagcactttgggaggccaagacaggcggatcacctgaggtcaggagttcaagaccagcctgaccaacatggagaaaccccatctctactaaaaaaaatacaggtgcctgccaccacaccccgtctctacctaaaacctttgtacaaaaggcaaaagcatctaagtctgcccctcagagactttcccaatttgtacagtttattctacaattaaactaattctgtgaaagcaaagccaaactgctaataatgttgagttttactcaagccctataatccagttaaatagatatggtcatagaaatcactgccttgttaaccactcagttctttctgttttgcagacgcagactcatgcaaagataccttttccattacttcacggcctttttttaaaaaataaagccagatactgactacaaatgcccatttttttttcttttctttttcttttttttttttttttttttttttttttttgtgagacggagcttcgctctcattgcccaagctggagtgcagtggcgcgatcccggctcactctgatctctgcctcctgggttcaagcgattctcctgcctcagcctcccaagtagctgggattataggcgcacaccaccacgcctggctaattttttatatttttagtagaaacggggtttcaccatattagccaggctggtctccaattcctgacctcaggtgatctgcctacctcagcctcccaaagtgctgggattacaggcatgagccaccacgcccccgacaagccccgtttttgatcacagtaaagggggagaggctggatattgagttctgttaatgtaaaaattctggaatgaagacattcggagagcttcctggttggtgaacgcagtgatgttctaggagggtggtactcaagtcctgtagggaagggggtcctatactcccttccctggagggtctagtgaatattggcccttgtgtgactcctcccagaggacagttgaagtagagggctggggccttccaggggacccccacttccctggtcatatatatcttttccatttggctgttcttgggtcatcctttttttttttgagatggagtttcactcttgttgcccaggctggaatgcaatggcaggatctcggcttcctgcaacctccacctcccgggttcaagcgattctcctgcctcagccgcccaagtagctagaatcacaagtgcctgccaccaggcccggctaatttttttgtatttatagtagagatggggttttaccatgttggccacgctggtctcgaactcctgacctcaggtgatccacctgccttggcctcccaaagtgctgggattataggggtcattctttaaaacaaactggcaaacttgtgtttttctgagttctgttagtagtactagcaaattattgaaattgaggagcgtttgttggatttctatgcagttggttagaattaagggtgcctccactcctccctgctgtaccaccctcccagcacatcagggccgggactggcatctgcagtgggggctgtgtcctggggtgggccctggacttgtggggtctgggctaatgccaggtgatgtcagaattgaattactggatccccagctggtgttggaaagttagttgatactgagcagtctccacatatttgttgtcagaaaaaatgacatcacaggtcagaaccttacatcgacttggtgagtggttgctggtgagaattaagaccctggaggagggagcatttccacactgagaaggggacagtagggtgagtagtgctctgcggattatattttctaattactcaaatattcctcactcattgcctaggagaagccactctgagctacatctccacagtgagagtgtagtaaacttttgaatgtgggtaaaggtaaacaaataagccttgggcatttctggcatgtctccctaatttcatcctccttctctgtacccagaggtgaccacagtactgattctgaatttttttttttttttttgagacggactctcgctctgttgcccaggctagagtgcaatggagcgatcttggctcactgcaagcccagcctcccgggttcatgcgattctcctgcctcagcctaccgagtagctgggacttacaggcgcccgccaccacacccggctaatttttttgtatttttatttttatttttattttttttgagacagagtctctctctgtcccccaggctggagtgcagtggcgtaatctcggctcactgcaagctctgcctcccgggttgacgccattctcctgcctcagcctcccaagtagctgggactacaggcgcctgccaccacgtccggctaattttttgtatttttagtagagacggggtttcactgtgttagccagggtggtctcgatctcctgacctcgtgatctgcccaccttggcctcccaaagtgctgggattacaggcgtgagccaccacgcccggccatttttttgtatttttagtagagacggggtttcgctgtgttagccagggtggtctcaatctcctgaccttgtgattcacccaccttggcctcccaaagtgctgggattacaggcgtgagccaccgcgcccggccttttgtggtttctttgcctcagtccgttgcacacatgctgctgtctgaggctgtgggtcacccaggttactaaccattccactgcttgatttgagttgttagtattttatctgttgccaatgtaattgttgtttttgtctccaagtgctaatgcttcataaacttctttttttttttttgaggcaggtcttcttctgttgcccagactgaagtgcagtggtgcaatcacagctcactgcaaccttggcctcccaggctcaagcaatccttccatctcaccctcccaagtagctgggactacaggcgtgtgccacatgcctgattaatggttgtatttttttatagagatggggtcttgccatgttgcccagcactcaaacccttgggctcagcactgggattataggcatgagccactgtgcccagccatgcttcataaatttttttttttttttcgagacggagtctcgctctgtcgccaggccaggctggagtgcagtggcgcgatctcagctcactgcaacctctgcctcctgggttcaagtgattctcttgcctcagcctcccaagtagctgggattacagtcacatgccaccacacccagctaattttttttttttttttgagacggagtttcactcttgttgcccagtctggagtgcaatggcaaaatctcagctcactgcaacctctgcttcccaggttcaagtgattctcctgcctcagcctccagagtagctgggattataggcatgcaccaccacgcccggctaattttgtttttttaatagagacagggtttctccatgttggtcaggctggtcttgaactcctgacctcaggtgatctgcttaccttggcctcccaaagtgctgggattacaggcatgagccactgcgccaggccccacccagctaattttttttatttttagtagagatggggtttcaccatgttggccaggatggtcttgatctcttgacctcgtgatctgcctgcctcggcctcccaaagtgctgggattacaggtgtgtgccaccgcacctggctgctttgtaagttttttatacattggaaaaaaaaatccctgggatgtagcttatagatagattgacttgggaatgccaatggaatatatggattaaccatctgaccatgtatgcatgtgtatttactccttataagtagttctctttatttttctctgtgtgattacatgttgctttttacactaggattgagcattttttctgtgtggcctttcatcttctgtaaaatagttttcagtcatcttgtcacattaaagtcatttgtatatttattgcttcatttcttcccttttttctttttttaacttactctgtaggctaattctttttcatttatagggattgctaatattttgttccagggagtgatttatcttttcactccattctacattttgatggactcttaaatttttttgtttgttggcttttttggccgccttctgcatgcaccatcatcaagggtggggaagggtactcttcttgattttaattgagttgactttggctcttcctttcaggcctacttaattttcttgtaagagaacattctagagagtgtatatttagggcaacttgaatctgtgctcccaggttaaataaagaacactctccctactgtcaagttggaaaaaaaattgtaacttatgaaagtttgctactttttaaaattttaaaattttttattttctctctctctctttttttttttttttttggagacagagtctcgctctgccacccaggctggagtgcagtggcatgatgttggctcattgcagccttcgcctcctggcgtcaggtgtttccagtgcttcagccttccgagtagctgggatcgcaggtgtgagccaccatgcccggctaatttttgtagttttagtagagacagggttcctgacctcaagtgatctacttgccttggcctcccaacatgctgggattacagacgtgagccactgtgcctggctgcttttgtttttaagaggtttgtgtttttctgatttgatcttgtttatagctggagactggctaaaactttatccctgtcctggtgtggctctgggggatttcttggaggatatttaaaatgtgcctttcaagggatatttcttcattctgttggagggcctgatgcctagatgttatacccatgaccaggtgtccctctcacagcacacttgtttatacttgctctgtacaagcaggcaccttgtagatcttgtctgaccattgtcagtttaatcctagactagagtagccactaatccggtatctattagtggctaataaacactaccactctgttcctaccaagagagccccgattatgatagtagttaggttcaaatagtagtcaggtgtgtcagttaggcaattaggtgagactcggaggagacaattcaacaaacacaggaaataacagaaggagtttattacttataaatcccagaggccggctgtggtggctcacgcctgtaatcccagtactgtgggaggctgaggcaggcggatcacgaggtcaggagatcgagaccatcctggccaacatggcgaaaccctgtctctactaaaaatacaaaaatgagctgggtgtgatggtgcgtgcctgtaatccctgctactcgggaggctgaggccagagaatcactttaaccagggagtcggaggttgcagtgagccgagattgcgtcactgcactccagcctggcgacagagccagactccatctcaaaaaaaaacaaaaaaattcccggagagaggagagtagcatgtcttgtaggccagcaggtaggtggaactatttgtgacacataccctcagcctgtcagtggggagcaagggaaagagagggaattgtgggccaaatcctttattggggtccaaggtgttacctaacccaatttctcttcaggaggttttagttggtgtgtttagaagaaggaagcacagaggctaagaagagtcagcagacaggccttattggttttcccactcaatctattagtattagtccatactctttttgtccaattgcagttctacggggtgttccatacttttatcattcctattgaatgacgtctgtataaaacgccatgcttttatcattcctattgaatgatgtctgtataaaaggcccaagaggatagggtatggggagcttctggacagctgaactcagggagtcttgtattataataggaaggtgatcaagaactcatcctcatgccaggagcgagtcatactgtaactctaccggaatggaagctcctgtgcttgggacccttgtagactttgccctatgcttctccacctggctgtttatttgtagcctttaaaatagcctttataataaacttgtaaacgtgttttcccgaattttgtgagctgtgttggcgagttaattgagccaaaaaagggtgttatgggaccctcaatttgaagcctgttggtcagaagttccagaggcctggtcttgccactgctgtcggatgtgtggggtcagtctcgtaggactgagccctcaacttgtggcatctgctgctgtccccaggtagatagcttcataatcgaatcggtttggcaggcacccagcagctatatgctgcacaattgattacttgccttttttttttctttttgagacagagtttcactgttgttgcccaggctggagtgcaatggcatgatctcggctcactgcaacctctgcctctcgggttcaggtgattctcctgcctcagcctccccagtagctgggattacaggcatgcactaccacacctggctacttttttatttttagtagagatggggtttctccatgttggtcaggctggtctcaatctcctggcctcaggtgatctgcccgcctcggcctcccaaagtgctgagattacaggcgtgagccaccacatttggccaattacttgctttttgatgtggagaaatccccacacagttggtcacagaagccttttgtgttgatagttgtggtgtgaggggaatagcaaggtgtgtttttttcacttagatgatatgcagagggttgaatattctcttgtagataaccatttgtccctgtccctgtgtcgaagtatctgtaatctctatccctgcctgacagtgcctgctctgtcacaggttcttgggccttaaatagatgctcttgtttcagattttgctatttttcattggtctgtctgtctctctggtaataccatactctcctgattactacagatttcaaatcctcgatgtatgttagagaaagaacctccctatcttagtcatttttgcctgctgtaataaataaccacagactggatgcctgaaacaacaagcattaatttctttctttctttttttttttgagacggagtctcgctctgttgcccaggctggagtgcagtggcaccatctcggctcactgcaagctctgcctcccaggtccacgccattctcctgcctgagcctcccgagtagctgggaccacaggcgcccaccaacacacccagctaattttttgtatttttactagagacagggtttcaccatgttagtcaggatggctttcttttttttttttttttttgagacggaatcttgctctgttgcccaggctggagtacaatggtgtgatctcagctcactgcaccctctgcctcccggttcaagctgttctcctgcctcagcctcccgagtagctgggactacaggcgtgtgccaccacgcccagctaattttttgtatttttaatagagacagtgtttcgccatattgactagctccaagacagaaaggcagagtagattagagtgtatttttggtttctatggtctgccttgcagagaaaaaagagcaagtgaaaggaggtcagttgaagggcagagagaaagattctgttttctttcgattttttttttttgggggggacagagtcttgctttgtcacccaggctggagtgcagtgatgctatcttggctcaccgcaacctccacctcctgggctgaaacgattctcctgcctcagcttcctgagtagctgggattacaggcctgcatcatcacacctggctaatttttgtatttttagtagagacagggttttgccatgttggccaggctcgtctcaaactcctgacctcaggtgatctgcctgcctcagcctcccaaagtgctgggattacaggtgtgagccaccacacccggccttatactttactttttagagtagttttaggttcacagcaaaattgcacacatagtacagagttcccttatgccccctattcccactcagtcacaacccgtccagctatcaacattctgcaccaaagttgtacatttgttacaattgaacctattttgagacattattgtcatccaaagtctagcctacattagaatttattcttgcagttgtacattctgtgagttttgacaactatacagtgacatttctgttatggtgtaatacagagtagtttgattgtcctaaaaaccctctcatccacctatttatccctctccccctgacttctggcagccactgatttttgtactgttctatgattatgtcttttctgcagtgttacatagtttgaatcatacagtatgtagtcttttcaaagttgtttcttccacttagtaataagcatttgcgggcatgtgatcatgaaattttttttaaaaagtaatacgcatttaaggttcttccactaccttttagctcatttatttttagtacctccattgtctggaggtagctgttatgtatccatttgtctactgtaaggcatctcagttgcttccaaattttgaaaattatgaataacgctgctataaacatctgtgtacaattgtttgcctggacctaaattttcagctcatttggataaacctacctttggtctggaggttaagagacacccctgtgccacatgggatgggttgtaaagaattcactctgaaaatcaagtgaatgtgggcctatgatgaggtttgtgtaaaacccctgtgtgtgtatgatctcctgattcaatgagtacttttttttttttgagatggagtttcgctcttgttgcccaggtgggactgcagtggcgggatctcggctcactgcaacctctgcctccttgattcaagcgattctcctgcttcagcctcccgtatagctgggattacaggcgcttgccaccacacccagctaatttttgtatttttagtagagatgggttttcaccatgttggccaggctggtctcaaactcctgacctcaggtgatccatctgcttcagcctcccaaagtgctgggattacagacgtgagccactgcgcccagcctttccatgagtattaatctccttttttgtaacagatctcctagtgggtgctgcgttaaacagagctgaacaaataaccctatctgcctgaagcagggtgggagacaagaaacaagatataagtagaatatgcagtgtgtcagatggtgcttagtcctaaggagagagagaaagctggggaggagtggagaggcctgggctgtgtttgtctctgcaagcacctgtttatgtctctgaggtgttatctctgagggtttgtgtgtctacctgggtatggccacctatatgtgcagtgacaaagtgtgagtgattttgtatgtctgatggggagacagaggctgtgtttgtatgccctttaaaatctggaatgcttttatttcattttcttgcctgattgccctggtagcatcttttagcatgttaaatagctgtgtcaaaaacagacatccttgtcttgtatttgatcttagggggaaacattcagtgtcaccatcagtatgatgttatagtggggttttcatggataccttatttcaggttaaggaagttcccttccatttccagtttactgaatgtcttcatggtggaagaggtattgaaaggatattgacccttgtcaaatgtttttgatactgattctattaatattgtgattttcaaatgtgaaaacagtgttgcttttctgggctacgtcccacttaagtatagaagtttttgtttgtttgtttttgttttgagacggagtctcgctctgtagcccaggctgaagtgcagtggcgcgatctcggctcactacaacctctacctcccgggtcccagttcaagcaattctcctgcctcagcctcctgagtagctgggattacaggcacatgccaccatgcccagctaatttttgtgtttttagtggagatggggtttcactatgttggctaggctgctcgtgaactcctgacctcgtgatccacctgtcttggcctcccaaaatgctgggattacaggcatgaaccaccgcacccagacttttgaaaaatctttttggtaacagtcattctcgcaggtgtgatgtctcattgaggttttagtttgcatttccctaatgatttgagatgttaaacattttttcatgaatgtctttgtcatttatatttgctcttttcagaaatgtctgtttagatcctttgcccatttgaaaaattggaggccaggcccagtggctcatgcctataatctcagcactttgggagtctgaggcaggtggattgccagatctcgggagtctgagaccagcctaggcaacatggcaaaacctcatctctaccaaatatacaaaaaattagctgagcattgtggcatgtacctgtggtcccagctactcccagctgaggtgggaggatggcttgagcctgggaggcagaggttgcagtgagccaagattgtgccactgcactccaatgtgggtgtcagagtgagactcaatctcaaaaataaataaataataaaagttttaaattggattgttttcttgctattgagctgtttgaattctttatatattttggattttaacaccttatcagatatatggtttgcaagtattttctcccactccgtgtgttgcctgcctttccactctgttaattgtttcctttgctgtgctaaaaagctttttagtttgacatccacatccacaatggtgctgtcaaaaacagctacatgggaacttgtttatgtactctttctgcagtgtctggtttcacccagaactcttttgtgagattaagcaccttcctcatatcaggaagattgtgggtctttcctattattcacagctgaatccctgagttaggtttgattgtatgtgatcaaacatagtatgtattatttcctcaagcaacatttttggacatgtttcttagaaatagtttactaactggtttcgaacagcatgtatgctaacaaatgttaatgtctttttcatttgctgctaagttatataaaaaattccattgcaatcatggatcagatcaactttataataaactttataattttgtggcgttatttgttaaatattgtgaatcaggcggggaggggtggctcacgcctgtaatcccagtactttgggaggctgaggtgggtggatcatgaggtcaggagatcgagaccatcctggctaacacggtgtaaccctgtctctactaaaaatgcaaaaattagccgggcgtggtggcgggcacccatagtccctgctactcgggaggctgaggcaggagaatggcatgaacctgggaggcggagcttgcagtgagccgagatcatgccactgcactccagcctgggcagcagaatgagactctgtctcacaaaagaaaaaaaagaaagaaagaaaaaaaaaaaagaaaaattgtgaatcaatattctgtgcatacaattttaggtgtgtttttttcacataaattttcattttcatgctcatgtagtcacagtttttatcacaagaattatttctcattcacttatgataccaaaagttaaatcaagcttttaacctttttccaaagattatcaggaccatagctcctgtcaaagaaggtataaaaaaaagtcatcataaatatgatagtaaaccatacgtgactgtgtggtgtatcaataggagagcgctcaaaagaatttctttttttttttttcttttttttttgagatggagtctcactctgtcggccaggctggagtgcaagtggcacagtctgggcttactgcaacctctgccttccaggttcaagctattctcctgcctcaccctcctgagtagctgggattacaggcacaggtcaccatgcctggttaatttttgtattttttatagagacggggttcctccatgttggccagggtggtctcgatctcctgacctcaggtggtctgccagcctcggcctcccaaagtgctgggattacaggcgtgagccaccacacccagcccaaaagaatttcttctaggacgtgtgcttgcttcaggtgtattgattgctattcaaagcaagaagcttctctggattgtatactatgaagaagcaaggttatttctggccttggttattatgatagttcttacccagaagtaaaaaagatggagtggcgctaagtttattacctaaacactgaaatatttcttatgatgaattagacatggcttcccataagatacctcagttgaaatatataaattctaactattgataattttttttttttgagacagagtctggctctgttgcccgggctggagtgcagtggcgcagtctcggctcactgcaagctccacctcccgggttcacaccattctcctgcctcagcctcccgagtagctgggactacaggtgcccgccaccacacccggctaatttttttgtaattttagtagagacggggtttcaccatgttagccaggatggtcttgatctcctgacctcgtgatctgcctgcctcggtctcccaaagtgctgggattacaggcgtgagccaccgcccccggccaactactgataatttttaaaagtctcccttattagtcaaattaggctaatgcctctaggaaagttgtcagaatataaacctagcaagggacagagacatgatcactattctaatcaagcctctcttgctcagataatatgctcttgatgctaatttttcaatatgcctcatatgccagaactgtagactcagaacatccagaattaagcacaaatgatgcaggcactgaaggctctgatatgggaacacaaagtgaataaattcttgaaatcctggtgcttatatttttgtgagaaaggagaggggttgaaaaaatggtaagactggtttataagaaggaaataagcactttgaaggaaagtaaatgatggtgtgagataatacggaagctgagggtgtgtgtatatgttctctgtggagggtggcaacatcagtgagtgaagaaatgtcaccatcggtcatttatatttccacctcttatacatcttcagcaccatttcaggaactgcttaagtgtggatgtagatagtgcatagcaatatagacagtcctgcctttttgaggttaacaataatgattccccgtaaagatataggtatggcttattgtcatttttgcattggttaaaaattttaatgcatgtaatatgtgatgctgactttggacatgggtatctggaacctggaggaaggcacaccactgcatacggtgtgtgctagaaccacgttggatccctgttgaaacatcttaagtgttctgccccttaagccacaggggcggagcctgaagttatatccagttaggggtgccaggatggcatcctacttattgtccaatcaggcgcgcctcagagccctgtctgcccccaacctcaccccaccctgtacgatcttgtggtgaattttcttttcttgagctggctgcattacctttcttctggctcctggctccactgccctggctctgtgctctgtgctggccgtggtagccggagggaggacccaggagaccccgaagatgggaaatggcgagtgtgggaaatggcaagtgtgcaggggcctggggtccgacatggctggaggggcccaggcctcctcgccatcagcatccgattctgtttcatctgagttgctcaaatgtgtgggaagcagggtatcaaatccacccccggcctaactctccttgatctggcagcaaactgctaaattgtaggtataatttctgcagtccccaacaccagcttctgttctcggatgcacagtgttatcaactatttggtttttttgttttgttttgtttttgcatttgtttttgtttttttttttttggtggagtctcattctgtcgccgaggctggaatgcagtggcgcaatctccactcactgcaatgtccgcctcctggattcaagcgattttcctgcctcagcctcctgagtaggtgggattacaggcacctgccaccacgcccagctaattttttttggggggggacagagcctcactgagtcgcccaggctggagggcagtggtgtgatcttggctcactgcaagctccgcctcccgggttcacaccattctcctgcttcagcctcccgagtagctgggactacaggcacccaccactacgcccggctaatttctttgtatttttagtagagacagggtttcaccatattagccaggatggtttcgatctcctgacctcgcaatccgcctgtctctgcctcccaaagtactgggattacaggtgtgagccaccgcgcccggccatttttttgtgttttttagtagagatggggtctcaccgtgttggccaggctggtctcgaactcctgacctcaagtgatctacccaccttggcctcccaaagtgctggaattacaggtgtgagtcaccatgcccagctgactatttgtccttccttctccattagagaaagatgtcatattttaagtttatcatttttgcagaaggcagtggatgacagttttataaagatttcttttatgtttgtgaccttttcgcctgagaggtaagcagagaataaccacctgaaactccattgtgaaaaagctttgtgtctctcttttatcttctctaagtgcaaacccttatcagaatgcctttgcattgaggttcccctttggaaactttgcagggttgattgccctcagcctgtcctctcttttcctggtcctggggttcagaactgactggggctgccccaagaagcccatagcttccatgtctcttggagggtctagtgagtatcagctcatgtggcccctcaggggagcccctggatgccttggacctagaagcagtgacatggtttactcttcctctgaaaagctcacctcttgggacactcagcttgtttttctctagccccagttttcattctttggagacatgttagtggtcagctaattggatggcagtattgaggggaaagacagaaaatgattcttgccctctggattctctcagagtacttgaagggagaaaaatgatcccaaaagacaaggaaaacccacctctgccaggttatgcaagaacttgaaaagcaaaatgcacttaggcatgggggtgggggcacagtccactgtctctgggaagggtcggtgagcagcactttagtgacaggatgggggttggggggatgtcccatgtgataggatgacctgactgggcagttaagtcagatttctctgtgttccaggttagagtggccttccctgattttgtcaccttaagaagatttgtttacttacttcatcatgtaaaatgtattttaccattaaagcttgaaagataggctaaaatatttccaaagagatgagaggtgtatctcagaaaaataaatatctacccttatatttgttaaaaatttgtatttaatttttccccccagaacatatatgcagtaagtttctcaggtctgttcttttttgtgattttgttgttgttgttgttgttttgtttttttttggtttgtttgtttgagacacagtctggctccaggctggagttcagtggcacaatcacgtctcactgcaacctccacctccccggttcaagcaatcctcccacctcagcctcctgagcagctagaaccataggtgcaggctacacgactggctaattttttgtagagatagggtttcaccatgttgcccaggctggtctcaatctcctgagctcaagtgatcctcctaccttggcctcccgaagtgctgggattttaggcgtgagccaccactcccagctccttttttgtgatttcaaatagaatcctagagtgtagccttgagaaggctacagggagaaaaagctcagagaaatagggagaatcactcttcattatggcttcacataactgaatctatctatctatctatctatctatctatctatctatctatctatctatctatctatgtttatcttgagacagggtcttcctcttttgcccaggttggagtgcattggcacccatcatagcttgctgcattctcatactcctggtctcaagcagtcctctcacctcagcctcctgagtagctgggactacaggcgtgcaccaccactgctggctaatttttaaatttttctgtagagatggaggttctcactgtgttgcctaaactgatgttgaattcctgggctcaaacaatccttctgcctcaacctcccaatgtgatggaattacaggtgtgagccagttcacccggccactgatacattttgatgagaaagtaggtagataaattggtgaattcaccaatttattttcaccaatttagtgaagattcatcaagctgggtgtggtggctcacgcctgtaatcccagcacttcgggaggccaaggctggcagatacttgcggtcaggagtttgggtccagcctggccaacatggtgaaaccccatctctattaaacatacaaaaattagctgggtgtggtggcacgtgcctgtactcccacctcctcgggaggttgaggcgggataatcccttgagcctgggaggcagaggttgcagtgacccaagaccctgccactgcactccagcctgggcgacagagcaagactccatccaaaaaaaaaaagagggctgggtgtggtggctcacgcctgtaatcccagcactttgggaggccgaggtgggcagatcacgaggtcaggagattgagaccatcctggctaacatggtgaaaccctgtctgtactaaaaaatacaaaaaattagtcaggcgtggtggcaggtgcctgtagtcccagctactcaggaggctgaggcaggagaatggcatgaacccgggaagcggagcttgcagtgagccgagatcacgccgctccagcctgggcaacagagagccagactccgtctaaaaaaaaaaaaaaaaaggtaaaaaatccttcattagtctcatttagtacttaattatatttgatctgcaggataggtacaagcttgcaagtattctctcttagtataataacagaagatgggcttaattttcccagtaaccaattgtgagaacacatgcgaaatgcttcctggagtgtttctgggggctcatcaggtgggcactatgtgttgcgcgtgtaacaaattcccaaactctcagaaggtgggacgccagaaattttcatattttttccataaagagtttaggcaccgagctactcttacataggtcattgggctccttccccaaatccgtttcccagataccaggaatggatgtgatgcaggacaggtgcgccctaaaattggggcttatcccaggatggtttccagctttgcccagggaagaattcaagggcaggccagtggtgttagataacagtgttttatttaacagtactggtctttgtggatcagtgctaactcataggcagtacacccagagtcagcaacatatggtctcttggcaactatatttatacccactttcaattatatgcaaattaagtggtgggttatttaaaactttctaaggaaggaatgataactttcaggtcattgccatggcatttgtaagctgtcatagcattggtgggagtgttttatgctaatgagcagtgagagcatctagagatcgctgttcttgtcgtctgctggttttggcccctttctttactttatcctacctgtgccagatcttgttttggccagtagggttgtgatcagaatacaagtcctgttggtctcctacctcagatgaatgttgtgaggagtgaggagcctttttttaagggtaagcagtctcaggactgctaatataaactcttttgcatagtaggtggtaggacttcgttatgacaggttctacaggtccactgtatgagcagacattagctgggactcaggcagcacgtattactccttgcaaccaccaccaagaaagatgatcagacactgctattgttctacccgatagttccattctagtatgagagttgctgtgtggaaggaagtgagtatgatgaccaaacagtggagtaaatgtttgcagacccctgaaacatgtgaacttcttatgaattgagtacagctccccagccctgtctgtctcacccattctcctctccacatatgtgggatgtttcaggactcggtggcttttgaggatgtagatgtgaacttcacccaggaggagtgggctttgctagatccttcccagaagaatctctacagagatgtgatgtgggaaaccatgaggaatctggcctctataggtaaggattgtatacttccatcacttagcaattaaagaagaagtgcttcttgtgcagtgatgctgttccatggtttgcatcatggagggagagtacttggggggctaaaacaggcatagtcacagggtatcatgaacctagaatctaataatttttctataattttgcactaattcagaatttttctgggtctctgttttagggaaaaaatggaaggaccagaacattaaagatcactacaaacaccgagggagaaatctaaggtaatttgtactcagagaaagcaaattcacttgaaagtaccttagcatgtcatgaaattttaaaaacaggcaaacataactgataagccaagcttcaaattgatttattttttgaatattttccccaaatacatattcttcagtgtaaacagatgttcagtttttataaaaatgttcatttgtcaacagaattaagaaactatttaagaatatcactgtttgagtgatagttgcggtcaagcccattgcagagcattgaattcattcatgctcaaacaaatcagacttggcatcgagtctacgctttacctgataatattgaaaatgcaagtttaatagctattaatataaaatgattaacaaatccttagtaatgtccgtctcattttttacagaagtcatatgttagaaagactctatcaaactaaggatggtagtcagcgtggaggaatttttagccagtttgcaaatcagaatctgagcaagaaaatccctggagtgaaactctgtgaaagcattgtatatggagaagtcagcatgggtcagtcatcccttaatagacacatcaaagatcacagtggacatgaaccaaaggaatatcaggaatatggagagaagccagatacacgtaaccagtgttggaaacccttcagttctcaccactcctttcgaacacatgagataattcacactggagagaaactctatgattgtaaggaatgtggaaaaaccttcttttctctcaaaagaattagaagacacatcatcacacacagtggatatacaccatataaatgtaaggtgtgtgggaaagcttttgattatcccagtagatttcgaacacatgaaagaagtcacactggagagaaaccctatgaatgtcaggaatgtggaaaagccttcacttgtatcacaagtgttcgaagacacatgataaagcacactggagatggaccttataaatgtaaggtatgtgggaaaccctttcattctctgagttcatttcaagtgcatgaaagaattcacactggagaaaaaccctttaaatgtaagcaatgtggtaaagccttcagttgttccccaaccttacgaatacatgaaagaacccatactggagagaaaccttatgaatgcaagcagtgtgggaaggccttcagttatctcccctcccttcgactacatgaaagaattcacactggtgagaaacccttcgtatgtaaacaatgtggtaaagcctttagatctgccagtacctttcaaatacatgaaaggactcacactggagaaaaaccttatgaatgtaaggaatgtggggaagcattcagttgtatcccaagtatgcgaagacacatgataaaacatactggagaaggaccttataaatgtaaggtatgtgggaaaccctttcattctctgagtccatttcgaatacatgaaagaactcacactggagagaaaccttatgtatgtaaacattgtggtaaagctttcgtttcttcaacatcaattcgaatacatgaaagaactcatactggagagaaaccctatgagtgtaagcaatgtgggaaagccttcagttatctcaactcctttcgaacacatgaaatgattcacactggtgagaaaccctttgaatgtaagcgatgtggtaaagcctttagatcttctagttcctttcgactacatgaaaggactcacactggacagaaaccctatcattgcaaggaatgtgggaaagcctattcttgccgtgccagctttcagagacacatgttaacacatgctgaagatggaccaccttataaatgcatgtgggaaagcctttaatgctctgggttcatgtcagatacattaaaatactcactgaagagaagccctatgaatgtaagtaacgtgggaaagcatgaaattctgtcagtgccttttttaatacatgaaagaattctagagagaagccatatacatgtaagtaacatgggaaagctttcaatcattttagttcctttcaaatacatgaaagaactcatcatggagaaaaccaaacaaatgctttttggaaaggaacccatatttgagagaaaccctgggtaaagggtgtaggaaaggttttgtcatcacacaaccctgtcacacatgaatgtgtagtggagagaaccttggtaaatgtaaagagtgtgggagagcctttagtcattttagttccacttgaagccatgaaagaacacacaaaagagaaagctcttgaatataagcaatgtccacacgtttttagccagcccacatgctttcaacaacatgtaagaatgtaccctggatcaaaacactataaatgtgaaaactacaaggaaggttttccattatacttttaaagtcatttgagggctctggctctgtggctttgtgggttaaagtacttgtctggcaaacaggagatgctggatttcaatcccagcagggcctcactagttgaggtattgaatttgaacagatgttttggctctggctgggtgtggtggctcacacctgtaatcccagcactttgggaggctgaggcaggaggatcacttgaggtcaggagtttgagaccagtgtgcaaaacatagcaagacctcatctcagaaaaaaaaaaaaagtcatttgaaaacttctaatacagcaaaatcctataaatgtaagtacttcaaaaagcctcatgcatagcgggtcatgtagtctctagaaaatacataacctgatggaaatgtagaagctatatgtatattttgttaattagtggctcatatttaaaatagttctctgactatggatttcaaatgcttaatctcacaaagaaatgttaaattgatataatcctgtaagtaatctgaaagcaatagtgcatgaatttcataggtagtgttgttttaggtcagtaaataaaatatttgtctttccattttgaaatgtgtttaatccaacaatgaatttaaatgtgtttctcatattcaggtatgttaaattgtatatggttgcttaattgttctgtgattgaggaccactgaaaaataagtcttaataaatgttggtatgaacctacttgcttcatttagcaggttcttgattccctttccacattatatacattccatcatatttattggaacagctccttttttttccttttttcttttttctttcttcttttttctttttgagacagggtctcgctctgtgctctgttgcccaagctggagtacagtggcatgatctcggctcattgcaacctctgccttctgggttcaagtgattctcccaccttagcctcctaggaagctgggactacaggcatgtgccaccacacctggctaattttttgtatttctagtagagatggggtttcaccatgttggccaggctggtagaactcctgacctcaagtgatccacccacctcagcctcctaaagtctgggattacacgtgtgagccatcacacctagcccattttttttttcttggctcaaataattttattttgcttcctattaaagagttgttgttaattctaagtatgtaaagtttatcacagactgtagtctcgtgaattattattttaacctgttgttctttactccttgttatttattctggctgctctttgtataattgattttgggataaggagacagctatgatagaataataaaatctaaaatgggagatgcctttcatggattgtgtcatgtcaatctgggtaatgggaactaaacttttcagacttcatttctttctttctttctgaaatagggtctcactctgtcactcaggctggagtgcagtggcacgactgtggctcactgtaacctcaaactctggagctcaggtggccttccgacctcagcctcccaaatggctggaactataggtatgtgccaccaagcccagctaatctttttatttttggtttttcatctttttttttttttgtagagatggtgtcttgctatgttgcccagactggtctcaaactcctggcctcaagtcaccctctagcctcagcctcttaaagcactaggattacaggcataagccactgtgcctggcccagaatttctttctttcatggttacctgtagactgcatcaatagcctaaattcctggaagtttagaatgcagaagtgaagaacgcattagtcagattttggaggcatcatacggagagacagatgcatatgggctgtttggacatggtcatctagcccattttcctgattctttgccctgccaatcaagagtatcctcagccgggtgtgctggctcacacctgtaattctagcactttgggaggccaaggcggtcggatcacctgaggtgaggagttcgagaccagcgtggtcaacatggtgaaaccccatctctactaaaaatacaaaaattagctgggtgtggtgtcgcgtgcttatagtcccagctgaggcaggagaatcgcttgagccagggaggtgaaggttgcagtgagccaagatcatgccactgcactccagcctgggtgacagagtacagagtaagaccctgtctcaaaaaaaaaaaaaaaaaaaaaaaaaagagtatcctctaatccaccactagctacttcacctccatgttctcaaagttatggatttccatagatgtttttaaaagcttcatatcaaagattcagctgccatttggatattcctgaaggccctaatatatctgccaagtaatcagttcatattgtcattgttgggaatagtctgatgatctgacttggttcctgtacggtccagtttgtacataaacatttttgtccatagggacagtgagtgttactgatgcaggttgagagctacaatggcactatccaaaaacaaaacgaaaaaccctacatggagcttgttcctctgctgcattatgcagagatgggtctcaccccgttctttcatgtgagaataagcaccttattcattatagaaacattgtgggtgtttcctgttactcatagctgaatgcagtccctcagtttattttgaattatgtttgagtacatatgattacaaacaatatacatgtcctcctcaaacaaaagttctctacacatttcttagaaatattaacagtatgcaagcaacttgcatactgtctggtgagttttgtatttattgagaatatatattaaaatatcccattccaatcatggatccgataaactttataattaagctatttgtccaacattgtgagtcaatattactgtgagcttacaacttcaggcctttttttcctcataaattttagttttcatgcttatttgattacaacttttatgatgatagtagtttttcatatgcataataccaaaagtcaaatcatgttgtgagtgatttctttccaaggactatcagggacgtccctgttgtcaagcagggtgtaataaattgtggtaataaatactaccacaggccgggcgcggtggctcaccctgtaatcccagcattttgggaggccaatgcgggcagatcacttgaggccaggaattggagaccagcctggacaacatagcaacaccctgtctctactaaaaatacaaaaattagcctggtgtggtggtgcacatctgtaatcccagctacttgggagtggaggttgcagtgagccaagcacgccactgcactccagcctgggcaacagagtgagactctctcaaaaaataaaaaaataataaataccaccacaaaccagtaatgactgtaaggtgtatcaataagagggtatttaaaagaatttattgcagaacttatgctgctttttggttgcttgattcctatttaaggaagcaaaaaatttctctgtatttgatatagtgaagaggtgaacttaattctacccttggtaattctttttatttttgagacggagtcttgctctgtcacccaggctggagtgcagtggcgcaatctcagctcactgcaagctccgcctcccgggttcacgccattctcctgcctcagcctcccgagtagcagggactacaggcacccaccactacgcccggctaattttttgtatttttagtagacggggtttcaccgtgttagccaggatggtctcgatctcctgacctcgtgatccactggcctcggcctcccaaagtgctgggattacaggcatgagcaaccgcgcccggccctagtaattcttttttttttttcttttgtgagacagagtcttgctctgttgcccaggctggagttcagtgatgcgatcttggctcactgcaacctccacttctctggtataagtgattctcctgccgcagcctccagcgacagtgccagacttcgtctcaaaaaaaacccagaaaacaaaaagacaaaaacctttcagaatacttcctgaatgatctgccagagcctgttttacagctttttttctggaggcggaggggacatggtcttgctctggagtagcttggattacaggtatgtgccacgacacctggctaatttttgtattttgagtcgagacgggttttgccatgttggccacgctggtctcaaactcctaggctgaagtgatcggcccacctcggccttccaaagtgctgggattacaggtgtgagccacagcacccagctgaatatacatttttctaaggaagataaacaactgagcaaggggacctgaaaagatgctggacatcattaagtaaatgctaaacaaaaaggcaaggaaataccacttcaaacccactaggatgggtagaatgaaaaagtgagataataacacatgtcaaggatatggagaacttggaaccctcatacactgctggtgagaatggaaaatagagcagccgctttgcttttttgtttgttttttaaatttttcttttttaagagatggggttttgctctgtagcccaggctgtcaaggctcactgcactctcaaacttctggattcaagaaatcctcccatctcagcctcctgagtagctgagaacacaggtgtgcaccaccatgcccaattaatttttctttttcttttagagatggggttttgctcttttgtcagggctggtcatgaacttttgggctcaagctatcctcctgccttggccttccaaaatgctgggattacaggcatgagccaccgtgccctgccaggagtttcttttttgaggtaatgaaaatgttctaggcctggcgcggtggctcatgcctgtaatcctagcactttgggaggctgaggcgggcggatcacgaggtcaggagatcgagaccatcctggctaacacggtgaaacccgtctctactaaaaaatacaaaaaattagctgggcgtggtggcaggccctgtagtcccagctactcgggaagctgaggcaggagagtggtgtgaacccgggaggcggagcttgcagtgagccgagatggcgccactgcactccagcctgggcgacagagcgagattccgtctcaaacaagaaaaaaagaaaatgttctaggccaggtgccgtggctcatgcctgtaatcccagcagtttgggagactgaggcaggtggatcacttgaggtcaggagttcaagaccagcctggccaacatggtgaaaccccgtctccactagaaatacaaaaatcagccaagcacagtggcgcgcgcctataatcccagctactctggaggctgaggcagaagaatcgcttgaacaccagaatcggaggctgtagtgacccgagatcgcgccattgcattctgcactccagcctgggcaacagagtgagactccatctcaaaaaaaaaaaaaaaagaaaatgttctataattgactgtggtgattatctgtttgcatctttgaatatactttactgaattgtacacttaaaagggatgcattgtgtagtgtgttttattctgatatagcttttcaaataaatatgacttcagatttttgattaatctgttaagcatactaagagtttccagatataccttaatttacatcactttttattgttcatttttgtatcagtgaaaatagggattcaattaccttaggtatatcatagtcgtttacatttcaaagttctctgcgaacacaatctgtaacctatttaaaataaattttcctgtagtgtgaaatgtacacttcagagtttaattgaacatatctcacagctgtggttagtctgataagcgtccttgcatccatgctagggatgtggggttcaaagagattgtgtgtaaaaggctctggaggccaagggattctttatttaaagtaaatgtgtggggattggggaaggaatgggtggaggtctcaatgccgttagccgtcaatgtcagaatggagctagactcattacacacggcgaagtcacttttaaagtgtctgtgtttgtgaacggagctcacagttccacgagtgccctctagactcaggccaagtccctggcccccggaggagtcagaccctcttgttccaatctggacttgcctgggtgaccctcttgctgtggatttgttccttaaagggtcactacatctggcaactgaggctggaattcgccgcgcacacttttgtccccgcgttcagaaacagctgcgacaggatgccagagtccatcgagaggctgggaacaagttcggcttctactcaactgcccctcgctgggactggtttccccccggactgaagcagggtttccccggcgacatgacctttcgcagctctgtcactccatgtgaagagggcggggcttcgtgaactgtccaatcagaggcgccacgtggaaggtgggtggggcaatgcggcataaaagaggtgggcgtcgtacgtcgttacgcagcgcggttgctgggcacctcgactatcacctgaccgtagtaatatctcccgctacgcgcgttgtgaccaatgctgcatacaggagatgagggaggacggccagacacctggaagccggaaaatggtgagtgtgcggggccggtgtcccgagacctgaggagggacaggttggaaccggccggaaccggctgtggcgggacccggggctcccctcggcgactctggggtctgggacccgggtccctctggcgcagctgggccctcagtgccctcggccgcagagtggggctgggctggcatccgggaccccgggcatcctgtcccgttcctgcgcgacgcctgcggccccggcctcagcctcggcgccctctctgggcagctgcacgccgcagcctcgtgtctccccagattgcacgggagccccgggagggtcatggggaggattccgactcgtgtgtggggttcgtgcgtgggaggagcagtgttctgtgtgatcctcagtccctcctttctccataaaggtcacccatcttcccttgaggtttccaaatgtatggaaagcagggtgtcaaatccataatcctgtctccagactatctcttcctggggctggcagtaaattcctaagtttgcggatcccttcccgcattcccaaagtctaacgccccctctccagttcacagcgtcattgtcaattgtttggcctctggtgcatttcacacggacgccgtgtttctcatttttccgaagaaccagggatgactcgttttaacggatttattttttgtttgcggatattttacatgggaggaaggcaaagaatacccacctggaattgttacataaatccttatgactctccttccagtatctctcctgagcacagacacactgcaggaactcttgggttggggctcctctttggaaacttccctgggtgacctgtcttttttagcagtttcaggtcggcactgcccgtccttgactttgtattcttgaaaagatttgaccactcacttgtgtgtcattttcttcatgtatctgaaaggtatataatcaatagctactaaaagtattataattttttatttctaatttttgtgggtacatagtaggtgtatatatttatggagtacacgagatgttttgatgcaggcatgcaacgtgaaataagcacatcgtgaagaaagggatatcccctcaagcatctgagttgcaaacaatccagttacactctataagttattttaaaatgtacagttctgtgtggtttttttttccacccattaattgtcctctcctttctctcaggctcccactacctttcccagcttctaataaccaccctactctctaagtccatgagttcagttgtttgattttctttctttttttttttttttggagatggagtctctctctgtcacccaggctggagtccagtggcgcgatctcggctcactgcaagctccgcctcccgcgttcaagccattctcctgcctcagcctcctgagtagctgggactacaggcacccgccaccatgcccggctaacttttttttgtacttttagtagagacggggtttcaccgtgttagccaggatggtctcgatctcctgacctcgtgatccacctgccttggcctcccaaagttttgggattacaggcgtgagccaccgtggccggcttgtttgatttttataatagatcccacaaataagtgagaagatgtgatgtttatctttctgtgcttggctgatttcacttaacataatgatctccaattccatccatgttacaaatgactggatttcattcttttttttttatgactgaatagtactccattgtttatatgtaccactttttttttttttttcccggcagagtctcactctgtgcactggtgtgattttggctcactgcaacctccgcctacagggttcaggcgattcttgtgcctcagcctctcgagtcactgggattacaggcatgtgcctccacacggggctaatttttgtatttttagtagagacgggatttcgccatattggccaggctggtctcgaacccctgatctcaggtgatcacctgcctcggcctcccaaagttgtaccacattttaaaaatccattcatctgttgagggacacttacattgcttccaaatcttagctattgaaacagtgctgctacagatactggagtgcagccatcccttcgatacactgatttcctttcttttgggtatattcccagcagtgggattgctgcatggcatatggtagctcaatttttagttttttgaggaacctccaaaccgttctccatagtggttgtactaatttacattcccatcaacagtatacaaaggtttccttttctccacgtcctctccagcttttgttattgcctgcctttttgacttaagccattttaactggagtgagatgatatctcattgtatttttttttttttttttttttttttgtatttttagtagagacggggtttcaccgtgttagccaggatggtctcaatctgctgacctcgtgatctgcccgtcttggcctcccaaagtgctgggattacaggcgtgcgccaccgtgcccggcctcattgtagttttgatttgcatttctctgatgatcactttttcatataaacacctttttatatgcctgttcgccattcgtatgtcttgttttgagaactgtctattcaaatctttcgtgcattttttgattggattattagactttttttcctgtagcgtttgagctccttatatattctggttatattaatcccttgacagatgggtagtttgcaaatattttctcccattctttgcgttgtgtccactttgttgattgtatcctttgctgtgcggaagctttttaatttgatgtgatcccatttgtccatttttgctttgcttgcctgtgcttgttgggtattgctcaagaaatttttgcctggaccagcgtcctggagattttccacaatgttttcttgtagcagtttcctgatttgaggtcttcaatttaagtctttaatccattttgatctggtttttgtatttggcaagagataaagatctagtttcattcttttgcatatggatatccagttcccagtaccatttattgaagaaactgtcttttccccagtgtgtattcttcacacctttgttgaaaatgagttcactctagttgtgtggatttgtttctgggttctcccttctgttctgttgctctatgtgtatgtctttatgccagtaccatgctgttttggttactatagctctgtaatataatttgaagtctggtaatgtgattcttccagttttgttctttttgcttaggatagctttggctattctgtgtcttttggggttccatatcaattttaggattgttttttgtatttctgtgaagaatatccttggtattttgatggggattgcattgaatctgcagattgctttgggtaaatggacattttaacaatattgattcttacaatccataaacatggaatgtttttccatttttttggtatcctcttcaatttcctttatcagtgttttatagttttcattataaagagctctcacttctttggttaattcctaggtatttaattttatgtgtggctattataaatggggttactttttaaatgtatttttcacattgttcactgttggcatatagaaatgctactgatttttgttgattttgtatcctgcaactttactgaactcgtttattcttacagttttcctgtagagtctttaggtttttacaaatattaagattatgtcatcaaaagtataaaaaattttaaagaggcaagaaagaggtgaatttcataaaaaataaaacacttcagtattacactgaaattggtgaacatttttttctttttttcttcgccttaggttgtgtagtaagtttctgaggtctgttcttttttgtgtggtgatttcaaatggaatttcagagcatagccatacaacacctagaagtatccaaatatgattatgagaacatttattgccatagaaataataactgaaatttcttttttttttttttttttttttgagacggaatcttgctctgtcaccaggctggagtgcagtggtgcaatcttggctcactgcaacttctgcctcccgggttcaagtgattctcctgcctcagcctcctgagtagctgggactacaggcgccaccactattcctggctaatttttgtatttttagtagagtcggggtttcaccatgtttgccgggatggtctccatctcttgacctcatgatccgcctgcctcagcctcccaaagtgctgggattacaggcatgagccaccatacccggcccaataactgacatttcattttctgcaaacaatagacatttgtggatttcagggactagggctggtttgctaaggtgccttacaattttcttaacactttacacatcaatacttgatttgagagattttgcagaattcttcaaacattgggtttgtctcagttaaagtatctgtttaggctggctgtgttggctcatgtctaatcccagaactttgggtggctcatgaggcaggaggattgcttgagtccaagagttcaaaatcagcttgggcaacatggcaaaatcctgtctttacaataaaataaaaatacaatatcagtggtggtccaaagtaacatcactgcccaagctaaggccacccttgagcctgccaagagcagtaattaaaggccctgttggttcttcttggggagcctccctgttcataccattaagccctttataccaagagaagccacagagcactggaaagctggggatccacatgcacatgttttgggtggaggggttgctttctgaggttgtaattgtggttttcttgggcgtgttttttagacatgaggtttgttttgcattcacaatgttgccacattcagagtataattcttacatactgagaaagcatgtgaagttcaggagtgctgtctccaggacacagggttaatgaatttcggaggttatttttgggccagaaccttaaagtaaatccagctgagagtttcttctgcccaagaattgaagcctgggagaggaagtattttcacactgccaggggccagttagggtgtacggagctcccagagttcattcctgtggctactcaagtgtctcttcccttcatcaccagggactattccactctagaagttacatgtcagagggagagcatggacctcaagcatgttaaggtgtttaacctcttgaatgtgggttttccttgtgaattgtggggaagcagcctgcttatctgagctaattagaatatttatgtttcctttggattattttatctgttgagcattgtggcccttcaactctggtttcccttattttataattttattgcctgtgtcagtgtgtaagattttagtttctttcactttgaaaatgaaggttgttagatatggtgggagtaagcaagaaaattctggaactaaacaaaatgtttgtttcttgaggccagagaacctcaagatacgagatgagtatgtttaagttctcaggtacttttttcatttttagatcagtttttgtatgtgattgtccataaagaactttgaaatttaaaagggtatacagttgctaagacaaatgacttcctgattccgttggtaagaggaaaacacagttgaattcttgttttaattgatgtgaggaaaactactaaagtttatataatctttgaaactcctgctatatttaaattaggcccaaatccataatgcattttattttatttatttatttattgagacagagtctcactctgtcgcccaggctggagtgtagtggcacaatctcggctcactgcaacctcccagttcaagtgactctcctgcctcagcctccccagtagctgggattacagccgtgtgccaccacacccagctaatttttgtatttttagtaaagacagcgtttcaccatgttggccaggctggtctcaaacccctgacctcaaatgatcttcccaccgtggcctcccaagttgctgggattacaagcgcgaatcaccacacctggcccggaatccgtatttaatgtttgctaacaacctaagactcagcgttccctttttcccttgtgaccacacctggacaagctgatgagtctaagggctcccttctctgtcataggcaagagatttaaaccatgtaactacatgcccatacaggggatcttgtgcccaactctaccccaaccacagtaaacaaccaggccaggctcctttctttgctctctcaggccatttcagttatgcttgatgggtctgtcctgctcttcccaagatctcaacaatgtgagcaataagccttttaataccccctctgtgagtgccagaccatcatcagttttgtcagaactatgtctctgaaggtgaccacaatgattggtgccgtgagcatgttgtccagacactgatcaccacttgtgggtccttcatctctttattattattttttgagatggagtctcgctctgttgcccaggctggagtgcagtggtacgacctccgctcactgcaacctctgcctcccgggttcaagcgattctcctgcctcagcttcctgagtagctgggactacaggcatgtgccaccacgtccagctaattttttgtatttttagtagagacgaggtttcgctatgttagccaagatggtctcaatttcctgacctcgtgatctgtctgccttggcctcccaaagtgctgggattacaggcatgagccaccgcacctggcctttatttttttaattattattgttattattattttttgagacagagtcttgctctgtcacccaggctggagtgcagtggtgtgatctcagctcactgcaacctctgcctcccaggttcaagcaattctcctgcctcagcctcctgagtagctgggattacaggtgtgcatcaccacgcccgagttatttttgtagatcttctcttgctctgacttgctaacccactgtcctgcctgatggccaacatgtccagtgagctactgctggctagaaagctggtgcttcgagtgtgctgctctgtgttgcatgttgagccctaccaagtatgggttctatattcaactgactgagtctgcctttttaaaaataattctttggcatttaagagtaggactatgctattggacccctccttcaattgatgctggatctatctgtgtgtttagagtgaagctgtgcctgatgctgggttggcccggtgtgcagggtgccagggtgcagcgggagggtggactatatacaccctgtacaagaggtgctcctgaaacagtagtcatttaaagaggagagagaaagggaggaaaggcagccatcaggtggcgcactgagtccacaccccaaaaggcaaagggctcaccaggaccttaaggacctctgctgctgctgctgctgcttcaggtacctttatcacaacaaatatcctgaccctggggcatagacgggacaatatccatgattccccagtggcataacaaaggggttagtttaaacctgacataggctagagatccttaaaccctatgaaggaactattgccatggaggaggcccctaactctgatgacactgaactgagcctctctggaggaaaaaaaattgtaactgtcccattagagaaagtaccccttttccttgaagtatatccactgaccaaaaagaaagaaagaaaaataaaaacatggaaggaagggagggagggatctcttgacctcttaaactcttagcctggggaacctagtgtgaccccatgtctctcttttttttttttttaaacaatgctagtaataagagggtttaaacctctgtggtttactgatttactctattaaagtaacttatcatacatattttttatgtttgtggtgggatgctaaatattaggatgggcattgctttattttttatttatttttatttttttattatttatttatttatttattttttgagacggagtttcgcttgttgcccaggctggagtgcaatggcaccatctcggctcactgcaacctctgcctcccgggttcaagcgattctcctgcctcatcctcccaagtagctgagattataggcgtgtgccaccacgcctagctaatttttttgtattattagtagagacggggtttcaccatgttggccaggctagtctcgaactcctgacctcaggtgattcacccgtctcctctcaaagtgctgggattatgggtgtgagccactgcacctggccgatttttttttttttttttttgagacagagtctcgctctgtctatctagctggagtgcagtggcaccatcttagctcactgcagcctccgcctccagggttcaagcaattcttctgcctcagcctcccgagtagctgggattacaggcgcaggccaccatccctggctaatttttgtatgtttagtagagatggggtttcaccatgttggccaggctggtctcgaactcctgacctcaagtgatatgcccagcttggcttcccagggtgctgagattacagacgtgagccactgcccagcctgggcattgagataggtcatatgcatagggctcatatatgaggtaaacagttttttcacagaagatgcattagttgatcataccaaaattgggagtatgatacctgaattcataagaataaaattgttaatagaagcattttaataacaaaattgtgtatatttccttttgttgttgttttttgtttttgttttgagatggagtctcgctctgttgcccaggctggagtacagtggtgcaatctcagctcactgcaacctcggagcctcctgggttcaagcgattttcctgcctcagcctctcggatagctggaactacaagtgcatgccactacgcctggctaatttttatatttttagtagtgatgaggtttctccattttggccaggctggtcttgaactcctggcctcaagtgatctgcccacctcggtctcccaaagtgctgggattacaggtgagagccaccatgcctgaccatgtgtatatttctagcgtgaagataggtaatgttcctaggacaatagtagcagttagggcatttattataatagtgtattctgctatgaaaaatagggatagtagacattgaaggccaagactagttctgatttgttttgtgttaagtcaaatggggctcagttagtttctgctagcattgaaatgaatcctactatggccaggggtcatgttggtagaattaattatccaaattcttgtgtgatgataagagttgataaagtgacccgcttatcaagaaaactgttaggagaataatggctaagtcaacttctgtgggattgtctgggctaccgctcggattgtgccaattagtgcatattttgaattggatgctcatcctgatgataaaatagggtagatgcgggaggcagaggttgcaatgagccgaggtcgtgccactgcacgccagcgtggacgacacagcaagactccgtctccaaaaaaaaaagggggggtggtagctggctaaacttgatgtggctagaataaataatactcctatatttatattcagaaatggggtattaagaagtggggtgtagagagagggattcatatgcaagggttaggacgaggtaggtgtgatggtgtaaaggaggatggatggcattagtgattgtggtggttcttttctttgtttctttctccttttctttcttttctcttctctctctctcttttctctctttcatatctctttcattttgagatggagtcttgctctgtctcccaggctggagtgcaatgatgcgatctcggttcactgcaacctccgcctcccaggttaaagcgattctcctgcctcagcctcccgagtagctgggactacaggcgtgcaccccctcgcctggctaattttgtatttttagtagagacggggtttctccatgttggtcaggctggtctcgatctcttgaccttgtgatctgcccacctcagcctcccagagtgctgggattacaggcatgagccactatgcctggctataagaatttacaaaacaaaaatgttacgtctgcttggccttggggcctgtacaagatagattctgaattaattttgacatctgctctaatgcattagttgataaccctttatgggattaatcaatactaggactcaaattatagttatacctgggtatcccactaaatttaagcaagatacccctgataatcttataagttactgaatataaagtggagcacaaattagatattgctcactttaaccaacagaatagtttttttcatgcctaaattctcagttcctcattgtcatagcacttattgccctaaaatattccatagtgagagaaggtctgaaccaatgagtcatgaatttaaatggtcttttaaattaaactttttttttttttttgagacggagtcttgctctgttgcccaggctgcagtgcagtggtgcaatctcggctcactgcaactttcgcctcccgggttcaggcaattctcctacctcagcctcctgagtagctgggattacaggcacccgccaccacgttcagctaatttttgtatttttagtagagacagggtttcaccaggttggtcaggctggtctcaaacccctggcctcgtgatccaccggcctcggcctcccaaagtgctgggattacaggcatgagccaccgcacccggcctaaacttctttatttatttttatattttgtagagacagaatctcactatgttgcccagagtagtctttttgtttgtttgtttgtttgtttgagagagtgtctcgctctgtcgcccaggctggagtgcagtggagcaatcatggctcgctgcagccttgacctcctgggctcaagcaatcctaccgtctcagcctcccaagtagctgggactacaagcacgcaccaccatgcccaactcacttttatatattttgtagagacagaattttgccatgttgcccaggctgacaagtgggcatttctttttttcttctttttttttttttttaaaaataacttttattttaggtttgggggtacatgtgaaggtttgttacattggtgaacttgtgtcatgggggtttgttgtacagattatttcatcacccagatactaagcccagtatccaatagttatgttttctgctcctctccctcctcccaccttccactgtcaagtagaccccattgtgtgttgtttccttctttgtgttcatcagttctcatcatttagctccctcttataagtgagaacgtgcagtatttggttttctgttcctgcattagtttgctaaggataatagcctccagctccattcatgttcctgcaaaagacatgatctcattctttttttatagttgcatagtattccatggtgtatgtgtaccacattttctttgtccaatctgtcattgatgggcatttaggttgattccatgtctgtgctattgtgaatagtgcaagctggcatttctaaaggtaagcagtcttaggagtgttatatgaacttctgtctgcacactaggtagtaggactttgtgatgacaaggtctgcaggtgcattgtaggagaggacttgggtgcttccagtttttcattgtgtgtgttttgtttttgtttttttttttgctttgtttttgtttttttgtttgttttgtgacagggtcttactgtgttgcccaggctgctctcaaactcgtggctctagtgattctctgcctcagcctcctgagtagtcactgtttttattcattaaaatcttgtctagattcaactgtttgcttcatagactgttatgtgatatggtaggtaatatgagaagagagaaaagagtttttctcacaaggtgctgaagcatcttattgcttctttagtgtaccatttctgtcatttcaccaaggtgccttctaccctgtcattagcagtaagatgtgaagtgatcacagcaaaaatgtagaaataatttccatgtctccatgatgctggtgaatttatgagtggctgtgggcagagaatgtcttctgatgacatagtaataaaataaatattttgggatcacagagtcatgtgattatcttacaaattgattatagatccccagccctgtcagtctcacccattttcctctacacatatgtgggatgttttaggactcagtggcctttgaggatgtggcagtgaacttcacccaggaggagtgggctttgctggatccttggcagaaaaaactctacagagatgtgatgctggaaacctataggaacctggcttcagtaggtgatgacgacaacattccttcacttagagaacaagttgcccatcaacgatatttcaagacctggcatgtggaaagggaatacttcagtaaataaaccaagcatggtgacagctaattagatctagaatctaatagtttttctataattaataatgatttccaatgatttttctgggtctgcatcatagggaaaaaatgtgaagagcataacattgaagatcagtccaaaaaccaagaaagaagtctaaggtgagtggcactaataagagttccatgagagagacttagtgtgtcatgaagttttaaaaacaagcaaagaaaacaaataagcccaccttcaaatgtggcttattcttggaaaatttttacccaaagtgtttacttaaatatgacatagatattcagtgtttgaaaagtagttcatttgatagcaatattaagaaactccatttatgaatattactgttttgatattacctgtggttgagccctcttccagaacattcagtctattcatcttcaaacaattcaggcaggactgaagttttaatttctgaaaatggtaaaaaatgtaattcctttacctattaataaatataaaatctttactaaagaaatcattatcatttcttacaaaagtcatgtattgtagacagactgtgtgtgaaaatagatggattagctaatcaaagtgaagaaaacttcagccagatctaaattttaatctgagtatgaaaactcctcctggagtaaatccatgtgaatgcagtgtgtgtggaaaagtcttcatttgtcattcatcccttaataggcacatcagatctcacactggacacaaaccatatgagtgtcaagattatggagaaaagccgtatagatgtaaggaatgtgggaaggccttcagttatttccagtcatttaaaaaacatgaaagaaatcacagtgaagagaaaccctataaatgtaaacaatgtgggaaacccttcagttatcgtcaatctgttcttagacatgaaaggactcacactggagaaaagccctatgaatgtaaaaaatgtggaaaaaccttcagtactcttacaggtttccaaatacatgaaagaactcacactagagagaaaccctatgaatgtaaggaatgtggaaaagcctttatttaccttgcaagctttcaaagacacatgataatgcacagtggagatggaccttataaatgcgaggagtgtggaaaagcattcagttgtcctagttcatttcaagtacctgaacgaattcacactagagaaaaaccatatgaatgtaaacaatgtggtaaagccttcagttggcttggttcctttcgagtacatgaaagaactcacactggagagaaaccctgtgaatgtaacgaatgtgggaaagccttcatttatcgaactacgttaaaaggacacatgaatattcacactggagagaaaccttataaatgtgaacaatgtgagaaagccttcctttctcttgcaagctttcaaatgcacatgataatgcatactggagatgcaccttataaatgtaacgaatgtgggaaagcattcaattgtcttaattcatttcaaatccatgaaaggactcacactggagagaaaccgtatgaatgtaaacaatgtggtaaagccttcagttgttccagttcctttagaatacatgaaagaagtcatagtggagagaaaccccacgtatgtaaacgatgtggtaaagccttcatttggcacaattccttttgaatacatgaaagaacccacactggagagaaaccctatgtatgcaagcagtgtggcaaagctttcatttattgtacaacttttcaaggacacatgagaatgcacactggagagaagccctataaagtgtaaagaatgtggaaaagccttcagtcatcccagttcatttagaagccatgaaaaaatacaccctggcagaaaacttcttgaatgtaagtaaagtgggagttttcaacttgcccacctccttacaaaaacatgcaataagaatgtgctagatataaagcttacaaatgtgagaaatacaggaagtttttcagttttaacaaatactgtcaaagtcatgtgaaaattctcactagaaagaaatccaataaaggcaagttgaggcatacctgtttgttattcaggaatttgctataaggttatactgggggagggggtgccatgtttaaattcaatggtatcttaaggtaaaactgtaatttaagccccagtattgattaaggacatggaaatttgccaactgatgcatttcaacggatgttgaagttaattcggagcctgttttgtagaggtgtgaaacccagtcagcacccatttatttttttgctgttattttaataaactttggatttctaatttgatcaaattatggacctttgtctcaatttttttcttttttcttttggtgattgcagggtgagggagaggggtgttctgtgtaccctacttatatttatatccttcattctctagagagcctcaagtcagtgtcatcatggttatgggcctccctcatggcagtggttgctttagagggtttcaggactgtgggcttaagtctgatttaaattaagggtatctctctgaagtctctattctattcctttgctctgtttttttttttttgtctttctttcttgagacggagtctcgcactgtcacccaggctggagcgcagtggcgcgatcttggctcactgcaacctccgcctcccaggttcaagcgattctccttgcctcagcctgagattacaggtgcccgccaccacgcccggctaatttttttgcagttttaatagagacggggtttcactatgttggccaggctggtcttgaactcctgacctaatgatctgcccaccttggcctcccaaagtgatgggattacaggcgtgagccaccacacccggcctccattgctctatatatctgcctttatgtcatgtcaacaccacactattttgattactgaaacttagagtaagttttgaaactaggaagagtgaggcttccagctttgttgttctctttttcttttcttttcttttttttttttttttttttttgagacagagttttgctcttgttacacagcctggactgcagtggtgtgatctcgggtcactgcaacctctgcctcccaagttcaatctattctcctgccttagcctcctgagtagctgggattacaggcatgtgccaccacacccagctaattttgtgtgtgtgcaatggctcgatctcggctcactgcaacctccgcctccctggttcaagcgattttcctgcctcagcctcccgagtagctgggattacaagcatgggccaccatgcccggcttatttttttgtatttttagtagagatggggtttctccttgttggtaaggctggtctcgaactcccgacctcaggtgatctgcctgcctcagcctcccaaagtgctaggattacaggcatgagcctccgtgcccagccaaaacttagagtaagttttgaaactaggaagagtgaggcttccagctttgttgttgtttttctttttttttttgagacggagttttgctcttgttgcacaggctggagtgcagtggtgtgatctcgggtcactgcaacctccgcctcccaggttcaatcgattctcctgcctcagcctcctgagtagctgggattacaggcatatgccaccacacccaactaattttttgtgtttttagtagagacgaggtttcatcatgttggccaggctggtctcgaactcctgacctcaggtgatccacccaccttggcttcccaaagtccagggattacaggcgtgagtcaccatgtccagcctgttgttctttttcaagattgttttggctatttggggtcctttgagattccctgtgaattttaggatgagtgtttctgtttccagaaaaaaatgtcatgggccttttgataatgattgctttgaatttgtagagcatttgcagtaatatattgacaccttaacaaaattaagtcttttaaattatgaacacagaatgtctttccatttatttatagctttaatttctttcagtaacgttttatagttttcagtatacaagtcttttgcttttttggttaattttttgtcatggcgttttgctgcgttgtccaggttagtctcaaactcctgggctcaagctgttctcccatcttaggatcttcagtagctaggactgcatgtctgtgtcactatagctagctgtttttttgtttttgtttttgttttgagacagggtctcattctgtcactgcactgtagtgcagtggtgaaatcatggctcactgcagtctcaacctcctgggcttaagtggtcctcccatctcagcctcccagtagctgggagtacaggcacaggccagcacgtccagccaattttttttttttttttttttgtagtatgaggtctcactttgttgctcaggcttgtcttgaacttctgggttcaagtgatcctcccaccttgggccttccaaagtgctgattttgcaggtgtgagccactgtgcttggcctgttttattctttttgatgttattactaatgtaattgttttcttaatttccttttcagattattaactgttagtgtattgaaatgtaattttaggctgggtgcagtagctcacacctgtaattccagcactttgggaggctgaggcgggtggatcatgaggtcaggggtttgagaccagcctgaccaacatggtgaaaccccgtctgtactaaaaaatataaaaattatccgggcctggtggtgggcagctataatcccagctactcaggaggctgaggcaggagaatcgcttgaacctgggaggtggaggttgcagtgagccaagatcgcaccattgcactccagcctgggcaacagagcgagactccgtctcaaaaaaaaaatgtaattttaaatgttaattttgtaccctgcaactttgctgaattcatttatgagttcagtttttgtgtacatatatgtgtatgtaatctttaggattttctacacataggattatgtcatctgccaacataattttatttcttccttgcccatttggatgccttttgtttttcttttttttttttttctgagacagagtctcactgagccacccaggctggagtgcagtggtgcagtcttggctcactgcaaccaccgtctcccgggttcaagcaattctcccgtctcagcctcccgagtacctgggattacaggcacccgccatcatgcccaggtaatttttgtattttagtagagacgggttttcatcatgttggacaggctgatcttgaactcctggcctcaggtgatccacccgcctcagcctcctaaagtgctaggattacaggcgtgaaccactgcgcccaactggatgccttttctttttcttacctaattactctgactagctcttccagtactatattgaatggaagtggtgaaagcagttatcctatcttgtttctgatcttaggggaaaagatcaccatgtttatatttcaccattaagtatgatagtcttgtagattcttcatatatggcctattacattgacctagtttcctcccattcctagtttgttgtttatcatcaacgggtcttgaattttgtcagatgccttttgtgtatcaattgagattactgtgatttttccgtcattcggctaatgtggtatattatattgaccgattttcataggatgcactgtttgcattctggagataaatctcacttgatcatggtttagaagtttttaaaaaatacagatgtagtcttgctctgttgcccaggctggagtgcagtggcatgatcataactcactgtagtctccaaactcctgggctcaagcaatcctcccacctcagcttcccaagtagctgggactacaggtgcatgccaccacacctggctgatttttgtatattttgtagacacagggtcttgctatgttgcttttcatatgcctgtttgccatttgtatgtcttcttttgagaaatgtctattcaaatcctttgcctattttttgaccagattattagattttcttcctatagagttgtttgggctctgtatatattgtggttattaaccccttgtcagagaggtagtttgcaaataaatattttctcccactcggtgggttgtatgttcactttattgattgtatcttttgctatgcagaaacttttgtaacttgatgtgataccatttgtccatttttgctttggttgcctgtgcttgtggggtatgcccaataaatctttgcgtagaccagtgtcctggagattttgcccagtgttttcttgtagtagttttatagtttgaggtcttatatctaagtctttaatccatttcaatttttgtatatggtgagaggtagggatctagcttcattcttctgtacatggatatccagttttcccagcaccatttgttgaagagactgcctttccccagtgtatgttcttggcacctttgtcaaaaatgagttcactgtgggtgtattgatttattgttgggttctcttctgttccattggtctatgtgtctcctttcatgccagtaccatgctgttgtggttactatagctctgtagtgtaatttgaagtcaggtaatgtgattcttccagttttgttcttttggtttaggatagttttggctattctgtgtcttttatggtgccatataaattttagggttttttttttctatttctgtgaagaatgtccttggtattttgagagggattgcattgaatctgtagattgctttaggtagtgtggacattttaacactattgattcgtgtaatccatgaacatggaatatctttccattttttggtgtcctcttcaatttctttcctcagtgttttatagtttttattatagagatctttcgcttctttggttaagttggtttcttggtaaaatttaattttacatgtggctgttgtaaatgggattaatttcttatttctttttcacattgttcactgttgacatagaaatgctactagttttgtatgttgattttgtatcttgcaactttactgaatttgtttattcgttctaattgttttcttgtgaattctttaggtttttccaaatataatgtcatataatcagcaaacagataatttgacttcttcctttccaatttggatgccctttgtattttcctcttgtccgattgctctagctgggacttctggtaccatgttcaatgacagtgtgacagtgggcatcctttttgtgttccagatctttcgagaaaacgctttcagttttcccccattcagtatgatactagctatgggtctgtcatatatggttgtgattatgttgaggtatgttccttctatacccacttttttgagggtttttattatgaagggatgttgaattttatcaaatgctttttcaggatcagttgaaatgatcgtatggtttttatccatcattcaggtcatgcaatgtatcacactggttcatctacataggttgatccttgcatcccagagataaatcccacttggtcatgatgaatgctctttctgatgtgttgttgaatttggttggtattttgttgaggatttttacatcaatattcatcagtgatattggcctatagttttgttttttttgatgtgcctttggttttgttatcaaggtaatagtggccttgcagattgagtttggaagtattccctactctgttttttggaatagtttgagtaggattggtattagttctttaaatgtttggtagaattcagcagtgaagccgttgggttctgagtttttctttaccgggagactttttattatggcttcaatcttgttacttgttattggtctgttcaggttttggatttcttcctgattcaatctcagtaggttgtatgtatctaggaattttttacattttttctattttttccaatttattggcatatagttactcatagtagccactactgctttgaatttttgtaatatcgtttgtcttctttttcatttctaatttatctggatcctctttttttcttatttagtctggctaaatgtttgtcaattttgtttaacttaaaaaattgatgttttggccaggcgcagtagctcatgcctgcaatcccagcactttaggaggctgaggtgggcagatcacgaggtgaggagttcaagactagcctggctaacatggtgaaaccctggctgtactgaaaatacaaaaattagctgggtgtggtggcgtgttcctgtaatcccagctactagggagactgaggcaggagaattgcttgaactgggacctgggaggcggagattgcagtgagctgagatcgcaccactgcactccagcctgggctacagagcaagagtccgtctcaaaaaaaaaaaaaatggtcttttgtattttcatttacttctgctctaatctttattatttcttttcttctaccaattttgggtttggtttgcttttgttttctagatcttcaagatgcattgttagattgtttcaagttcttcctcttttttttttttttttttttttttttgagatggagtctcactctgtcaccaggctggagtgcagtggcaggatctcggctcactgcaagctccgcctcccgggttcatgccattctcctgcctcagcctcccgagtagctaggactacaggcacccgccaccacgcccaggtaattttttgtatttttagtagagacggggtttcaccgttttagccaggatggtctcgatctcctgacctcgtgatccacccgcctcggcctcccaaagtgctggggttacaggtgtgagccaccgcgcctggcctcttcctcttttttgatgtaggcatgtagtagctataaacttccctctgagtactgcttttgctgtatcccataggttttggcatgttgtgttgccattatcatttgtttcaagaagttgtcccattttcttaatttcttcattgacccactggtcattcagtagcatattgtttaatttccatgtatctgtatagtttccaaaattcctcattatttatttctagttttattccattgtggtcagagaagatgcttgatattatttcagtatttttttaaatttttaaatttttatttatttatttatttttagacagagtctcgctctgtcaccaggctggagtgcagtggcgcaatctcggctcactgcaaactccgccttccgggttcaagtgatttttctgcctcaacctcccaagtagctgggactaccggtgcatgccaccacacctagctaatttttgtatttttagtagagacagggttgcaccatgttggccaggatggtctcaatctgttgacctcgtgatctgcccaccttggcctcccgaagtgctgggattacagatgtgaaccactgtgcgtggcctttttgaatgttttaaaactcattttgtgaactatatatggcctatccttgagaatgatccatgtgctgaggaaaagaaggtatattctgcagcttttggatgaaatgttctgtaaatatctattagatccatttgatctatagtgcagattaagtctgatgtttcttcattgattttctgtctggaagatctaagtctgaaagtggggtgttgaagtatccagctcttattgtatcagggcctctctctttagctctaataatctttcctttttatatctgtgtgctccagtgttgggtgcatatatatttacaactgttatatcctcttgctgaactgacccctttattattatatagtgaccttctttgtttcttcttaacagtttttgtcttgaaatctattttgtctgatataagtatggcaactactgctcttttttggtttccattagcatggaatatctttttccatccctttattttcagtctgtgtgtgtctttataggtgaagtgtatttcttgtaggcagcagatcaatgggttttggtttttcatccattcagccagtttgtgtctttggattgcagagtttagtccatttatattattgttattgataaataaggacttactcctgccattttgttatttgttttctggttgtttagtggtcttctcttcctcttttcctttcttcctgtcttcctctagtggaggtgattttctctggtgataagattcagtgtctttttattttttgtgtatccattgttttttcggtttaaggttaccatgaagcttgtaaatactatattttaactcattgttttgaactgataacaccatttgcataaacaagcaaaaagaaaataaaaactctacaacttggttcacccccttttaacttttagttgtttctatttatatctaattgtactatgtcttgaaaaattatgtttattatttttgagttgttcactgtttaagtctttctacttaggacaggagtagtttatgggctgggtacggtggtcatgcctgtaatcccagcactttgggaggccgaggtgggtggatcatgaagtcaggagatcgataccatcctgggcaacatggtgaaaccccatctctactaaacatacaaaaattttctgggcatggtggtgtgtgcctgtaatcccagctactcaggaggctgaggcaggagaatcacttaaaccagggagttggaggttgcagtgagctgagatcgtgccactgcactccatcctggcaacagagcgagactctgtctaaaaaaaaaaaaaaaagtagtttacatagcacagttacaatgttacaatattctgtattttcctgtttactattactagtgagttttgaaccttcaggcgattatttattgctcattaatgtccttttctttctgattgaagtgcttcctttagcatttcttgtaggactggtctggtattgatgaaatccctcagcttttatctgggaaagtctttatttcttcttcatgcttgaaggatattttcaccagatatactcttctagggtaaaagttttttccttcagcgctttaaatatgtattgccactctctggtggcctgtaaggtttccactgaaaagtctgctgccagatgtattggagctccattgtatgttattgtttcttttctcttgttgctttttaggatcctttctttatccctgaactttgggagtttgattatgaaatgccttgaggtagtcttctttgagttaaatctgcttggtggtttataacctttttgtacttggatactgatacatatctctagtttgggaagttctctgatatcactttgaataaactttctacaaccttttttctacttcctctttaattaaatcttagatttgcccttttgaggctatcttctagatcctgtagatgtgcttgtttcttactcatttttcttgtctcctgactgtatatttccaaatagcctgtcttcaagctaattctttcttgtttgatcaattctgctactaaaggagtctgatacattctttagtaagccagttgcatttttcagctccagaatttctgctcaatttttaattatttcaatttctatgttaaatttatctaatagaattctgaattccttttctgtgttcccttgaatttctttaagtttcttcaacacagctattttgaattctgtctgaaagatcacatatctgtttctccaggattggtcccctggtgccttatttagttcatttggtgaggttatgttttcctggatggtgttaatggtagtagatgttctttggtgtcttggcattgaagggttaggtatttattttggtcttcactgtctgggcttatttgtagctgtccttcttagggaacgctttctagatatctaagttatatctgctttagggggcaccccaaacccagtatgctgtggttcttgcatactcatagaggtgctgccttgatggtcttggacaaaatctgggagaattctctggattaccaggcagagactcttggtctctttccttatgatctcccaaacatagtttctttctctctctgttctaagccacccaaggctgagggtggaatgacaccagcatccctgtggccaccaccactgtgactgcactgggtcagacctgaagccagcgctgcgtcttgcccaaggcctgctgtaaccactccctggctactgcctgtgttcactgaaggcccctggggtctacaatcagcagatggcaaaaccagccaggcctgtgtccttcctttcagggtgacgaggtcccctaagccccaggtgagtccagaagtgctgtccagtagtcagggattagagtgaaaaaaaccttagaagtctgccttgtgtcctgttgtattgtggcttggctgagctggcactcaaactacacaagtccttccctcgaaaggcagaggaacctcaccccatagccaccgccccaagccacaaggagttctgtcagagtactgctactgctcatgttcccttagggctaaaggtctcttaagtcagcttgtcatgaatgctgcctcttcagggcagtgggctcccctctagcccaggacaggtccagaaatgctatcgaagaatcaagttctagaatcaggggccccaagaacctgcttggtgctctgcccctctgtggccatgctggtgcctaaggtgcaagacaaggtccccttacttttccctctgcttttctcaagcagaaggagttttcctctgtagccaccacaactggttatgtgctgagtctcacctgaagccagcaagtctcagaggctcaccaaaggcccttcatgtagtgcctgggtatcgttactggttattcagggtccaagggctcttcagttaacaggtgattgctggcaggactgggtccttcccttcaaggcggtaggttcccttctggcccaaggtgtgtctagaaatgtccgcgagctaggccctggaacaggggcctcctgattctgaccagtgccctgtcctactgtggctgggctggtatccgagatgtaagatacagtccccccaatactgtctcctccctcaagtagaaggggtctcttttttagctgacagctgtgcagcctggggttaaaggaggggtgatcccatatgtcaccacccctccctgccccctgtcggttcactgactctgggcctaattcagcactaggactcacctaagagttgcagtcctcatgggctagactgcctttcaactttacttggagagagagagtgctgcagccctcagcaatgcggtttgcaggtgcttaagttcagaccactgggatcagcagttcctccctggctaaggctggttaagtgcccctccgtgggcaggtatcagctgaatttggtctgattttcctttctgctctaacaggacagcactgagttcagtgcctcacaattgctgtgttctccctcccacagcacctagacttgctctctgcatgatgctgctgttgctgggggtgggagaggggtgctgttggtgattcaggactgttttttaaatcgcttcattgcctctttcagcgatatgaagttaaaaccaggtactataagtgcttacctgatttttggttctcatgaaggtgttttttctgtgtgatagttgttaatttggtgtccttgcaggaggatgatcaggggagctttctattccgccatcttgctctgtccctttctatagtttaaaatatttgaggtatgttagggaaggtctcatcttgtttttcagaaagcaaaactgtttttattcattattcctataacatttggtgaatatgtatcactacacacctcagaatggctaaattccaaaatataacaccaaatgcttccaaagatgcaaacaaaggaacattcatttctgtggtaattcaaatggcagaggttgcagtgagccgagattgcgccactgcactccagcctgggtaacagagcaagacgctgtctcaaaaaaaaaaaaaaaaaaatcacaaagtgatcccatttcacacaaactacaaactagataggcaaaaatacattattccacgactggcaacactagaattatctaaatatacatgcaagagtggtgggacggtcaattcatgtactccattgggacttggtggcaatcttaaagttgctcagaatctacaacccagcaagttttctctaatgtatagagaatttactgtgcacaggcacatggggacttaaagtatgattagagcagcattttccataagaacaaaacacaaaattgaagcaacatgaatcctatagatactggaatggatgagcaaattgggtagcccaagcctcagacaccagcatgtgtgaaacaactgggacaaaaaccaaggagacgcccatccatgatttccttccacagaaagtgctaaagaggcaaacttaagcaaaacactgcttggtgataaaataatggcatagccataaagaatatccacaaaattaagggcagtggtcacctctggggacaagagggaaacaaagtcaaggtggagcagcactgggagctgtgacatgcccagggtctgttcattctgagtgcccagtctacggaagtttacagttatgattaaacataaaacattctacgcattctataagaagtatgctatatttcactataaaaatataattcagctgagtgtggtggctcacgcctgtaatcccagcactttgggaggccaaggcaggaggatcatttgaggccaggagttcaagaccagtctgggcaacatagtgagacctccatctctaccaaaaaaataattctttaagtttgaaaaataactttcaaatatttattttgccatgttttctaactaccttcccagttctcatttcactgccttagttcagtacagatttctaagtcttttagattgtacctattgctattcatcttgattacagcaagaaatgactagcaaaagaatgggaacatattcagtgtttaatagagaactgactatataaacttccatcttttaaaaaaatatatttattaaaacattttttggggggagacagggtctcactctgttgcccacgctggaagtatagtggcacatagttcactgcagccttgaagtcctgggttcaagtgatcctcccacctcagcctcccaaggaactgggactacaggcatgtgagccacacaactggctcaacttctatcatcttgtgaacctttataaaaattagggaaggcaccaatgaatatgaaaaagctgcaggatttattttcaaatgaacaaaaaagcaaagtgtgtaaaccatgttgccttttatagtgaggaaagaaaaatatgtaatttaaattgctttttatgtaaatgccggacaagaaagtaataaaattgttatctttgggaacctgaggccactagacacgaatgctagaggacatgctaagagtgagccttcaggtagactgcttctaaatctcaggctgggttttgggtgggtgggtgtgtgtgtgtacacacagggttttttgttttttttttttttttgtagagacaaggtcttgccatgtttcccaggttggtcttgaagtggcctcaggtgatcctttggcctcaccctcccaaacagatgtgagtcactgtgcccagcctcaggctgaatttttgaatcttaacattgactataaacaatgattaagaaaatttgcattaagtatattttaatagttcataaatcaaatgactaatttttaacaggtaactagttctttgtgttttatggtcctctaaagaagttttatgaagtgagcagtatgtttttgtaaaccataaaaagttgttatgcacataaagatgggagcaatggacgctggggactgctggaagggggagggatggtggagagtgagggctgagggaatgcctgttgggtgctgtgctcactgccaggatgacaggctcacccatagcccaaacctcagtgtcacagtgtgcccatgtgacagacctgcatatgtaccccctgaatctaaaagttgaaattattaagaaggtaaattgaaatgtattttttttgtgatatgattcctgatgtttgtgagatgtgggtttgtgtattccatcccaggaatctttaaaaaataaacgttaacaaaaaaatttttttatcacttgagctcagaagttcgagaccagccagggcaacatagcaaaaccccatctctataaaaatttttaaaattagccaggtgtggtggcatgtgcctgtagtcccagctacttaggaggctgaggtgggaggatggcttagagcttgggaggcagaggttgcagtgagctgagattgtgccactgcactccagcttgggcaatagagcgagacatgtctcaaaaaaaagaaatgaaaaaaataattttaaacatttggttcttaaattacaagtgatattacaggttgcactgccatcacatatagggcattttttgatctgggcagaatcttaaggcattaggatggcgtaacagtatgaggagcttcactaacccactccccagagacacttatgacagttactttaaaacaaccatttaaagcccctgaagtcatcctaaaggcaaacagccagtgaggaaacctattcaagagaatctgtgaaaattctgtgagaaatgtgagtttgtggtatttaaacccttactgttccctgatcctgtaccccacatcctcaccccagtgaggtgaacactccactctagactgtgtagccaaggatacaaggttctctctttctagtgtaagagttagagttaaagaggaaagaggctgggcgcagtggctcacacctgtaatcctagcactttgggaggccaaggcaggcagactgcctgagctcaggagatcgaggccggcctgggcaacatggtgataccgtttctactaaaacacaaaaaattagccaggcatggcagcctgcgcctgtaatcccagctactcagaaggctgagacaggcgaatcacttgaacccaggaggtggagcttgcagtgagctgagatcacgccactgcactccagcttgggcaacagagcaagactccgtcttaaaaaaaaattaaattaaaaaaaagaggaaagaaacaccgaacactgcttgacagtcaaagacaggtttattatagaaaagacctgagagaggattctggctggtcagtcaggagcacttttccttgcagactaagaatgtacgttggttttagggtgagggagcttattacaagcttggaatgtttctgtgtgggggagaagtttgtggcagggttggaatgttctgggcggaggggtggttatcttgggggtgacatctttccggcaggagaggggttatcccgaggctagcatttctctgtgggaggtgtctggaatgtttttggttggagatgttatttgtggtttgtgatcatgctgaccttagccattaggctgatgccctttggatttaggcagtttttgattaaggtgaattttaaaatgaggcgcttatccacaatggtgatgcttctgctctgtcaatccagacctcatagttataaaaaggacgaggggcggcatgttctttctggctacttcctgctgacgaggggacagagagttctctggtatcgggttggtaggagcagtgccgtctgtagatatttttgggtagttgtctgtgaaatggccatgatcctgtcagtttaaaaaatctctgaaaaaggttaattaggcagggtaagaacattagtcccataattaggtatattattaggagagggcccaggaatgggatgacccatgctatctatgattttgttcccaaaccaagaatctgtttgtttgttttggtactccttagctttttagcttgttttttttaatagcgctttttactaggtctgattggctgatatagaaacaacattcctttcctaataagaggcagaggtgctggtttggaaaggcccatgtgttattttctgttagtaaccattattcccgctatgaggataataattaagcgaaatgctatggtaattgagattctgtgtctgatattttaccctgagggtgctacagtatatagtcctactgcaaatagtagagtgagtaaagcaattcccacacgggtggcgtagtaaataatttccattaaaaagttttaatatttggcttaaaaggagaggtaggaacgataaaagtatttgatgaggtaggggtgagactgaataggatgagtaattctctcttggttacttattttagcttaaggtttcctatttatttcctccggtgagagtcgggggcttagaggcagcgcctgctgaaacatcaagttttcagtttatagggctttcagaaagcacagctattttggaaacttgtagccagaaaaattagaatttaatttaaacagaaaatagtaagaattgaaaaacattaggcaacaccaggatttaacaacatgtgtgctatcgtttttgaaacataattttctctctcaagtttaccattttcattaaaagacaaatcataccagtaggactgattttctttattatacttggcttagttatttgcatacagtggagcaagaataattatttgttacttaggtcctttaaattggctttgatggaactttgttttgtagaaggaatgtgagataagacctttttaaaggcaaggccagccatagatttgtaccactgaatacctatgagttgggagaaatcctctcttcttgaggttctaagataacttgggactcctggcctgtcagaaagtgacattctttacttaccacagatcggaaaccctgtacagggactgtacatgaaatctgaggccagctttccaagggctttattggctccataagtcaaatttgattccttaaaggaaggcacaccattccagttaaagccttggtaaaataaccagttttcccaattgtgtcctgttacaaaagaaaacagattcttgttgcacttatgcaaataactatattaccctaacttaagaatacatacagatagtttccaaattctggagaaaatcaggtagagagaaacaagaatgctccaaattttgttcatggaagcatactaaattgttaaaagctgtcaataattcaaaagaaaagattcttggactttgaaaagcaaaacaaagaattagcaatattttaagcaatacgttaaaaagatcactccaggctgggcgtggtgggtcccatctgtaatcccagcactttgggaggccaaggtgggtggattacctgaggtcaggagttaaagaccagctgggtaacatggggaaaccacatctctactgaaaatacaaaaattagccgggtgtggtggcgaacgcctgtaatcccagctacttgggaagctgacacaggagaatcgcttgaatgtaggaggaggctgcagtgagccgagatcatgccactgcattccagcttgggctacagagcaagactctgtcttaaaaacaaacaaacaaaaaagatcactccagtctcctgcagtttagttcatgcagttaattcctgtcctgattcatattaacattttagctttttaagagttctgaacgtttttcctctattgtgatatcacaattttcagaaacttgcattcaagggcacctgttagacctttatagctgattataaaaccacctttttaaagaggaccaaaacaagacaacaattgtttatggatgacagaaagttttaggataggccgggcgtggtggctgatgcctgtaatcccagcagtttgggaggccaaggcaggcagatcaccttgaggtcaggagtttcagaccagcctcaccaacatggtgaaacttcgtctctactaaaaatacaaaaattagccaggtgtggtggtgtgcacctgtatgtaatcccagctactctggaggctgaggcaagagaattgcttgaacccaggaggcagaggttgcagtgagccaagatcgtgccattgcactccagcctgggcaacaaaagtgaaaatccgtctcagaaaaaaagttttagaatagccatacttaaagacgcaattgacaaggatatctgttacctttgtggcacacaataattttaacataacaattataattattacttataaggtacactaagatatgtcagaattataggagtctcccataactttgaaacacataccaataacatacttatacaaatatagcccaaagaaagccaaacaccattttgtatttgacaatgcttcctgtatgattttataccaaatatgccaaattttaccattatagtagtgtgctatgaatattaaactccatttttaataaaaccttgtagatgcatttactcaattttaatgtttgaccataaggtaagatttttatagaccctttttaaccctttataatttttgttaaaaagcaggttagtgcttaagagaaacccgttgtgtttttattttaatgctcaatttacagaaaaactagatgctaccccttcaactttagccaatatgtttacacagaatttcctttacaattaacctgccaaaacgtgcttaaaccttcaaaacaattgtttaacttaacttttttaaaccttcaaaacaattgtttaactttttaatgtaggtaaaaatccacattctcatgcctccttataatctttttaccaaaagtgtattttactttccttacacactttccacataattaactttcagtaaagtttacttttgttgaaaaccttggtaagtttgggattttaattatgtactaggtgtagagcctaggacctagacttctgtgcagataaggtctggcttagtccagcatttaattccgtgtgtcctaggttttacctagctgcaaagcaggcaagttgtacaggtaagagttataggggcattttataaagcagtcaggaggcctaatcacttttaaattgtacatttcttgcataaattccatttataaaatttttcatgcctttcacagtctgacatgcctcaactttctgacttgttgtaaacatctctctctttaaacaaccagttaatttactttagtacaaaaatttaccatataaaatttttaaatataaattatcttttaatataaaagataccagtcctttcccaaaacaaacttccttcatgcctgtggactagactgcctaagtccataagattagaagttaggatattaaatggcttaggatgtagctattttcattaaaccaatattaatgtttcacttattaaaaaattatacaaagattattttgtttgggctgagtcatagttttgtttgttttgataccttatagtatttggcagagataagaatgaaattgcttgattaataaatgcaaacaaaaacatatgctggtaactcttaagacagttctaactttactgtaccagtaagttttaaagattaaagtcatgtgaactgaaagatcccacagcttttacttttcccttaaaaatatttgatttaagcacttattttttttgccaattataattagagttcctttaatagacattgcacacataacacatatataaccacacagacaaccagaagaagattcagtagttacaatattttttttctcctaatttcccaattggcttattggcctttgggtggtgccctttaagaacagggctaggaaaacagtttccagggcctaataaacaagtagagctggaagacaaagattttgagaggtacttattcacctttaattccaggggttccataaggaaaacagatttttcccaaaatgggatttgtggtgccttttctgttttcccaagggatcccaggccaccagaaaccgttttaggattttatacatgcaccaagagtggcaagacagagtggaaaaaagtaattcagttaactgggaaaaaaccttttccaggaaaacaagatctatgaagagaagccttttgaatatactcatagcttggaggagggaaagacctggagagggttttcattaggaagaaagatattttttttttttttgagactttgtcttgctctgtcacccaggctggagtgtagtggcgtgatctctgctcactgcaagctctgcctcccaggttcacgccattcttctgcctcagcctcccaagtactgggactacaggtgcccgccagcacacccggctaattttttgtatttttagtagagatggagtttcaccgtgttagccaggatggtctcgatctcctgacatcgtgatcagcccgcctcagcctcccaaagtgctgggattatagacgtgagccaccacgctcagccaggaagaaagatttaggaagaaagattttatgagaggtgcaaacttgacacagggagcgttgggatttaaagtagaagcagaaagcctgaatatagagaacctcttgccatttgctgttcttggttataaagttgttaaggttcctgagaatttgcaagctaaaggtgccatttttgggccatcagctgtcattatctaatgtgtattggggccaggccatgttacaataaaagactacatgcttaagccaagtttggcgaggttgtgaaggagacagcacagtggagagggtgtgggaatgtgggattgtttggcacccatgtggactggcaagaagaagccgagggtgtctgtttttgttctaggcgtccccagacaaaagacagagacctggagttctctttctaaagaggatggtcaagctgagaagaaactgggcatccccaagatttcctctagcttagtcccactggtcctctgaggaccgagatggcagacctgactttttccagataccatgagaaagccaggggagggcagatcttaccagtcagctggattagtgtctgatgttaacgttccagttggcctcttgggctgcagctgcacaagggagagagagaaaagggaggattagagaaaagtgaactgaataaaaagacaacgagtggtggccagagacctccaggatccaggaattaactcaggacaagctgctgttgcccactgcttcctgggttgcaggagagcctctgcccccagcacccatcctgggtttcggcaccaaatgtaagagttagaggaaagaaacacgaaatgcagcttgacagtcaaagacaggtttattttagaaaaaacctgagaggggcttctggctgatttctgtcagaagtgctttctcttacagactaagagtgtatattggttttagggtgagggggcttattacaagcttggaatgtttctgtgtaggggagaagtttatgggggcgttggaatgtctctgggcagaggtggattatcttggggctagcatgtctctggtctgggaggagttggaatgtttctggttggagatgttatttgtggtttatgatcatgctgacttagccattaggctgatgccctttggatttaggcagtttttgattaaggtgacttttaaaatgaggtgcttgtccacgatggtgatgcttctactcggtcacccagcctctagtcaaaggcttttttccaggaagggcagaacttcagcttttctcatcttacctccacctacccattactgaggttatgtcctgtgtgggtatgtttgaaaagtggggacatggtttgtgagtatggtgcactcagactactaggacactgatcaactttgcctcagctcgtagaggtggtggatccatgccaggacacaggccaagaggacatcaggctgctgtccctccccgccactgaacactcagttcctaaagagagaggattactcagaaagcagcttgccaacgctcctacccaagcttcagagccctgtcagattttgccttgaggtggaagagaagcaagctgtgaaacacatagctcctaacctcttgcctaagaattaacttcaattgcaacagatcatgagacatttaagtcaaagggcactccatccttgatgcagtggaaatggggaaatggaggtgaaagacaattcacaggagatttgtggatttaatgaagatactgcctgcactgtaggccagctaatttgtggacaaaaccaggaaaaaaacactgttaggaggagtccattaagcatctaaacaaacaactattaaacgctgatctcagatagtattgttagaaaggagagaaaacatatttggatttacagggcaaatttgtccctggacttttttgagaacaatagagctatctgaaggggtgggttgcccctccacacctgtgggtgtttctcgttaggtggaacaagagacttggaaaagaaaaagacacaaagtatagagaaagaaatagggagacccagggaaccagagttcagcatatggaggatcccgccagcctctgagttcccttagtatttattgatcatttgtgggtgtttctccaagagggggatgtgtcagcgtcacaagacaatagtggggagagggtcagcagacaaatacgtgaacaaaggtctttgcatcatagtaaagaatcaagtgctgtgcttttagatatgcatacacataaacatctcaatgctttacaaagcagtattgctgcccgcatgtcccacctccagccttaaggcggtttttccctatctcagtagctagaacgtacaatcgggttttataccgagacattccattgcccagggacaggcaggagacagatgccttcctcttgtctcaactgcaagaggcatgccttcctcttttactaatcctcctcagcacagaccctttacgggtgtcgggctgggggacagtcaggtctttcccttcccacgaggccatatttcagactatcacatggggagaaaccttggacaatacctggctttcctaggcagaggtccctgcggccttccgcagtgtttgtgtccctgggtacttgagattagggagtggtgatgactcttaacgagcatgctgccttcaagcatctgtttaacaaagcacatcttgcaccccccttaatccatttaaccctgagttgacacagcacatgttccagagagcagggggttgggactaacgttatagattaacagaatctcaaggcagaagaatttttcttagtacagaacaaaatggagtctcctatgtctacttctttctacacagacacagcaacaatctgatctctcttgcttttccccacaccatcagccagcaatcagtgcagtttaacatctgagggctgtccaagagaggaagagattcccacagtaccattgtcatgccaggatgactgcaggcagaaacaaagctgagccacttcccctcccctcaagagcaatatcagagacttaaagttatgaagaagaaattgacagagcaagagcatcgccatcgtggacaagcacctcattttaaaattcaccttaatcaaaaactctaaatccaaagggcatcagcctaatggctaaggtcagcatgaccataaaccacaaataatatctctgaccaaaaacattccagactcctccctgaccagagacatgcaccaagataaccctcactctggctgggaagatgccagccctgagaaacccccctccggccagaaagatgtctgccccaaaataacctcccctctgcccagagacattccaagcttgtaataagccccctcaccctaaaaccaatatatactcttagtctgtaagaaaaagtgctcctgaccaaaataggccagaagcccttcagattgtttctaaaataaacctgtctttaaccatcaagctgtgtttctttcctctttaactcttacagaaatagacttcaccaaaatagtccaatcggtctctaaacaaaacaaagcaaataacaataacaaggcccggagaaattgaacatacttgagaaggttcagtatgttatcaaaaatgtccaatttgcaacaagtacaacccatacatcaaaaaaaaaaaaaaaaaaaaaacctgacaatagaaactgcctgtgagaacagatagcaaatttaatcgaaaaatacttcaaagtgtacattataaatatgttcacagaaccaaagaagagcatgacttaaacacattgaaatttggaatctagctgaaggtttctccacaccaactaccctactttcacaatctttctaatgtaatgactactgtaaaaaatgacaagcctggctgggcgcagtggctcacacctgtaatcccagcactttgggagaccgaggcaggtggatcatgaggtcaggagttcgagaccagcctgaccaacatgataaaaccctgtctctactaaaaatacaaaaattagccgggcatggtggcgggcacctgtaatcccagctacgcaggaggttgaggcaggagaatcgcttgaacccaagaggcggaggttgcagtgagctgagatcgcgctgctgcactccagcctgggggacagagtgagactctgtcttaaaaaaaaaaaaaaaaatgacaagcccattattagtggttcattaataggttttgaacgtacattgctaccagtatcacagaaagtgcaggttttctgccatgtatgaattgtttgaaagtaaatgcactgattactctgcaacaaggctcccccatagctattataaaaataataacatccatgtatgaagtttcttagttctgtttccctgtgaagtatgttataaatacttcaacatctatgttacagtaagtatattatttgtgttgaaaattttgttttaaaaattgataacatgcaaagatcccctcaagggattttcctcttgtgagggcaaatcaccttagatttctcccaggctttttctattgatctttaatgttctggttgtgccatttgtttcctaaaatgtagaccgagaaaaatcattatcatttagaaagcatggaaaaattactggattgtaggttcattgtgcactgcagccatgcttgatcaattcatcaaaatacctcctttccacattccaaattttggaacagcactgatggccaaaaagcacttgttctctaattgactaaaggaaaaaaatagtatcctcacctatagaagccaggtgctgatggcttccctcatcacatctctacagattcttcacggaaaaatccagcaaagcctactccttctggatgaagttcagagtcacatcttcaaagaccaccaagccgtgacatatcccagatatgtgtagaggaggacaggtgagacggacagcactggggatctagactcaattcatgagagttcacactgaagcggtgtcattgtctcggagccatggaaaactaggacatggacaaacagaggttctgagcagaagtttaataggcgaaagaaagacatgagctctctctgctgcagagagaagggtctcagagaagtgggttgctgttcccacagtgaaatgcagttttatagatgagcttgaggaggcagtgtctgatttacacagggtacaaaagattggttggggccgggcgtggtggctcatgcctgtaatcccaacactttggggggcagaggcgggcggatcacaaggtcaggagacatcctggctaacagggtgaaaccccatctctactaaaaatacaaaaaattagccgggcgtggtagcaggcgcctgtagtcccagctactcgggaggctgaggcaggagaatggcgtgaacctgggaggcggagcttgcagtgagccgagatcgcgccactgcagtccgacctgggcgaaagagcgagactccgtctcgtctcgaaaaaaacaaaacaaaacaaaaaaaccgacaccagttcactacaatctttctataaaatacaagagtaaacacttcctaatacatgctaggaggccaacagaatcctactgccaaaactagatagatacattacaaaggtggaaaactatagaccagtaactctcatgatcatagatcctaaaagttctcaacaaatattcacaaattgaatctaaaaatgtataaaaagaattatacaccacagtcaagtgggaatcattacaggtgtacaaggctgattcaaaattcagaaattgccaggtgcggtggctcatgcctgtaatcccagcactttgagaggctgaaaagattgcttgagcccagcaggcagaggttgtcctctgggagtgaaccagaggctgatattcactagatcctccaagatacctggcaactgtgagtatcctgggtcaaccccaggaagttctaaaacccaggaacagggacagatcaccctataaaatttccaaaagggaacctcaatccaaagacattctggtaaggtgtctgtgcctagggaagataaaaggaggagaggcacaaaagagtaagtgcacccgagtttcatgcacttactctgttttcctcatgtgaaatgttcacaaacagaaaaatattttaaaaagagctatcgctctgtgaaaaaaatgataaagtactgcatctgtttgaaatgtacaataaaggacaaatagttgataatattttgaatcgatgaagcaaagttggcacttgggaatgtggggaaggaattggaaatttaggaattcatacaaaccctagaagggttaagttcggcaaacagaattgtggatttgagacctgcgtcccacacttttggaaaatgcaagggcaaacaaatacacgagaaaatcggtacccctggggagtgttaaaagaaataagaggcaatcagactggaatggctatagtgccctgagttgcttcccaaggacaccaaaatcggacacaaatgtagcttgtaaattaccaatttagaggaaaatgaagtttagcctccgactacataaccagaacatttccacctggatagacctgtcagaaataggaagaactgaaagaaatttgttaaaaagtggcctaagatggctgcaggttggacatacaggtaatagaaaccaggcccatgaaataaaactgaactctcagcctgcaagttaaatatttcactgacctgtactgatgacaaccttgcctatcagatgaagcgaaggtaggacagattcaatcatccctgtctaaaccctgcgatgcctgtgtactggttaacctttcatatactttcaccacatacttgctttatcttataaggtcactgcccacctctcccattttctgtgtaacacaaggtataacacttcacgtagcccactccaggacacattgtttgtgctgggtctgcattcccaggctattgtccttaaacttgacttagaataaaacgcctgtttttttaacctttggttgacagaccaaataaggcgacttataaccaaagatttaacttggcttgcttcctcatacaccttataaaagcctttccttcaagcccccctgacgggaccccaaagaacaagccatggttgggttattcatgaattgctcttggctaaatagttaaatatttaacggtgctgcattttaatttttacaggtgaaaggcaggattgggaaccccacagaccgcagctcctcccaggagaaccccacacatgagtctggatcctcgccatgatcctcccgtggcccccacacaatctggggagacgcggggccgcgggcactgcgctgccgagagggctccggactgaggctgcagttgctgcgcagggacggctcaggatgcccggggtcccggctgctggcccagccccaccctgtggccgaggggacccagggacgagctgcgccagggagactcgggtccgcagaccccggaatcgctgctgacaggcccgggtcccaccacagcaggtcccaaccagcccctcctcccacccggccttgcacactcaccatttcccggctcccaggtgtcccgggtcctcccttggctccggagatcagtgctggtcaccaccggacagaagctgtggtggagccacctcggcctctggaaggctgaattcagtgggttaggggaacaggagccccttagacttgcggagcttggccccaccctcctggcggagcgcctgattggataatttacacgaccccgcccagtacccctaggataggaatcaagccccaccccctaggcccgggtttcaggagaagccacggaaaactcggaagtgtggagcaggattgacaggttctagcaacagccctcccacccccccgcccaggccaggcttccttctggagcttggacgtgaccccacactggggacatttgcatttaagaaaaacttggctccaggctttccacagtgggccctggcatcttcctatactcactgggccctttctgtttcttccttctggacgggggttcacaagtgtgagcaggcagttccacactccgtgtccaattgagccagtacctttgctggaagctactgggctggaacaggagggagagcccagatgtcttccagggatcaggaatttgggataagcggctggtggcatggccaaggcttcctcataccttatctcagtctacccattttcagggaagaaaatgaaatatgccaacaagggaacaaaaattaagtgcatggaaaaaagttatactacagcaatattctgtaaagaaatcaaaaggggccgggcgcgatggctcaccctataatcccagcactttgggaggccaaggtaggaggatcacctgaggtcaggagtttgagaccgctctggccaacatggtgaaaccccattctctactaaaaatacaaaaactaggccaggcgcggtagctcacgcctgtaatcctagcactttgggaggccaaggcgggcggaccacaaggtcaagagatcaagactatcctggccaacatggtgaaaccctgtctctactaaaaataccaaaaaaatcagctgggcgtggtggcacgtgcctgtagtcagagcagctcgggaggttgaggcagtagaattgcctgaacccgggagacagaggttgcagtgagccaagatcacaccactgcactccagcctggcaacagagagagactgtctcaaaaaaaaaaaaaaaaaaaaaaatagctgggcatggtggcacgtgcctgtaatcccagctactcaggaggtcgaggcaggacaatcacttgaactcgggaggcggaggttgcagtgagccgagatcgtgccactgcactccagcctgggcagcagagtaagacttcatttcaaaaaatgggaagaacagcaaacattttaactagctcagataagcatcctccttcacaaggaaaagccgcattcagaaaatgaatcacgttcccaaccttaagagccaggttctgactgctgtaacgcagccccagaggggatcagtctgtgagttcctgtcccctcagtgtggaaatgctccctccttcaggaccttaattttcaccagcaggaaactctcacctggaatcagcttaaggttctgatctaaataaactgtcaaaatcataaacccattctccagaagacaacccaaacaagtctttctctaaacctgaactaaacagatttttttagagggagtctagctctgttgcccaggctggagtgcagtggcgtgatctcggctcactgcagcccccacctcccgggttcaagcagttctcctgcctcagcctccccgagcagctgtgactataggtgcacaccaccatgcccagctaatttttgtatttttagtatagacggggtttcaccatgttgaccaggctcgtcttgaactcctgacctcaggtggtctgcctgccttggcctcccaaagtgctgggattacgggagtgagcgactgcacctggcctttttttttttttttttttttaaacaagatgggggtctcactatgttgctgaggctggtctcgaagtcctgccctcaagtgatcctcctgcctcagcctcccaaaatgctgggcttataggtgtgagccaccgagcaagcccagcccaagttgcatttttttttttttttttttttttttgagatagagtctaactctgtcatccaggctggagtgcagtggcgtggtgtcactcactgcaacctccacctccctgttcaagcgattctcctgcctcagcctcctgagtagctgagactacaggcgcatgccaccacacgcagctaatttttgtatttttagtagagatggggtttcactatgttggccaagctggtcttggaactcctgacctcgtgctccacccgccttggcttcccaaagtgctgggattacaggtgtgagctaccgtgcccagccccaagttgcgtttttatatagtaacaataaacggtctgaaagaaaattaatgaaacaattccatttacaaaagcaccaaaaacagtaaaaattcagccaagaggcctgtatcttgtacactgaacactacaaaagattgctgaaacaaattaaagaacagacaaataaatcgcaagtaatcccatgttcatggattgtaagacttcctattgttaggatgagcatactacccaaattaatctacagatacaatgcaacccctatcaaaatccttatggccttctttttaggccgggcacaatggctcacacctgtaatcccagcactttgggaggctgaggcaggcagatcacttgaggtcaagagttcaagaccagcatggccaacacggtgaaaccccgtctctactaaaaatacaaaaaattagccgggtgtggtggctcgtgcctgtaattccagctactcaggaggctgaggcaggagaattacttgaacccaggagatggagggtgcagtgcactgagattgtgccactacactccagcctgggagacagagtgagattctatctcaaaaaaaaaaaaaaaaaaactagaaaaaatcaaccctaacgttcatttggaatctcccctaataccaaaacaatcttgaaaaaaagttcaaagactcacgcttcctgatttcaaactggctataaaactaccatcatcgaaaccacatggtactgtgtagggacagacatacagaacacagatcctagaaagaaaatgcttgcatatgtggtcaaatgattttttgacaacagtgccatgatcattcaatggagaaaggatggtctttaaacatatgttgttgggaaaactgggtatctacattctaaagaataaagttggacccttaccttatatacaaaaattaattttgagtcaaagatctaaacttaaaagccaaaaccatagaagacttagaagaagatataggagaaattttcatgacattggatttaacaatcatttcttggatatgaaatctaaagcacaggcaaacaaaagataaactgaactacatgaaaatttaaaacttttgtgcaccaaaagacaacatacagaatgagaacatatttgcaaatcacgtatcttggaagagattaatacccaaaatacataggaactcctacaactcaacaaaacaaaccaatgagcccattcaaaaatgagtgagggacttgaaaacatttgtacaaagatatataaatggccaacaaccacatggaataatgctcattaccactggtgattagggaaatgtaaatcaaaacaccagtgacagttcacaactgttggaatggctgccatttaaaacaaaaagtagaatataaccagggttggtgagcatgcatagaaactgcagtccttgtgtattgctggggagaattttacacacagccactgtgaaaaacagtatggctatacatgaacatagaaaaccctgtgacccagcaattccactcctaggtatgtatctaaaagaatagaggccaggcacggtggctcacacttgtaatcccagtactctgggaggccaaagtgggtggatcaccagaggtcaggagtccaagaccagccttcctggccaacatggtgaaaccctgtctctactaaaaatacaaaaagttagctgggcatagtggcagacacctgtaatcacagccactcaggaggctgagacaggagaaacacttgaacctgggaggtggaggtttcagtgagccaagatcgcaccactgcactccagcctgggcaacagagcgagactccgttgcaatcaatcaaccatggaaagcagggactcagacacatacgcactgattttagagcagtattcagagtagtcaaaagagttttgtggaaacaacccaagtgctcaacatatggatggataaacaaagtgtggtgtatccaatataccacacttgggaatattattcaggcacaaaaactgaattactggtacatgctaacatgtggatgaaccttgaaaacattatgctaagtgaaataagccagacacataaggacaaatactgcatgcttctacttacatgacgcacctagaatcagcaaattcatagagcaagaaaggaaaatagagattaccaagggatggggatgggaggaatagggaatggttgtttaatgggtaccaatttttttttggactaatgaaaaaattctggaactagctagctagctgtgatggttctaaagcactgttaatgtatttaatgctactgaatggcatacttacaatggtaaattctatgttactatatttgaccttaaaaaaaattaaaggccgggtgcggtggctcacgcctgtaatcccagcactttgggaggccgaggtgggcagatcacatgaggtcaggagttcaaggaccatcctggctaacacagtgaaaccctgtctctactaaaaatacaaaaaattagccgggcgtggtggtgggcacctgtagtcctagctactcgggaggctgaggcaggagaatagcgtgaacctgggaggcggagcttgcagtgagccgagattgcactactgcactccagcctgggtgacagagcgagactccggctcaaaaaaaaaaaaaaattaaaaactggccaggcacattggcacacggctcacacctgtaatcccagcacttcgagaggccaaggcaggaagatcccttgagcccaggaaacctgtctgggcaatatagtaagacctatatagtaagaccttgtctctccaaaaaaaaaaaaaaaaaaaaatatgatttaaaaaattacctgggcatggtagtgtgcacctgtagtcccagctattcaggaggctgaggtgggaggatcatttgcttgggaggcagcagtttcagtgagccaagagaacactactgaactccagcctgggtgacagggagaccctgtctgaaagaaaaaaaattaaaaactaaagacacaatttgagctactagaaaggaaaacaacaatgcctggtataaaatatgcactggattgaataaccagatcagatatttcaggaagaaattaagacccagcaatagaaatgacataattttaaatacatgcacttaacaaattgccaaaatacgtcatgcaagaacacacagaactgcaaggtgacacagaaaaattcacagttaactgaagacttcaacacttctcagtaatacaaagatccaacaggcgtagattcagtaaacattccttttttattttaaaatacttcacaaagattgtatatgttcatgatgtacagttatgttttgatgtatatatatacattctgtaatggttaccacagtcaaattaacacattgatgaccacccatgctgtacattaaatctccagaacgtgttcaccttacaacttggtttttaacctttgaccaacatttctccattttccctaccttctggactctagtaaccaccgttcctccctctgcctcggagtttaagtttttaatattccacaattaagtgggatcatgaagtatttgcctatgtctgccttattttatagtgtccaccaggtttattcatgtgacaaatgtcaggatttcctttttacggctgagtaatattctgtttaaatatacatcacactttctttattcatccattaatggatgctaagtttgtttccatatgttgactattgtgaataatgctgtaatgaacatatgcgagtggcagatatctctttgaaatactgatcactgcctttggtcatatatgcatatacccaggagtgagactgttggatcacatggtagtttttgtttttttttgcagaacctccatattgtttttcacaatggctgtaccaatgtacattcccaccaacagtatacaaagcttcctttttctctgtactctaacactaatctctcttgatagtacccatccttgcatgtatgaggtaacatgtaattgtggttttgatttgaatttctctaatgattagtgatattaagtcccttttcatttgctttccggccatttgtatgtcttctttgaaaaaaatgtccactcagggtttttaaatttattttttcttattgtttttaccccttgcagaaaccagtctatttttcttaatttgttagttttttgagatgagaggggtctcattatgttacccaggttggtgtcgaactcctggattcaaacgatcttcctgactcacacttctgagtactgggactacaattgggcaccactatgcccagctaataatttatttatttatttattttagacatgaagtctccctatgtcgcccaggttggtcccagattcctagcctcaggcactcctcccaagtacgtggaattataggcataagccacggcacctggcctcctaaacttatgagtgttccaacttgtaatagactttgaaacatatacaacttgttggtgcgtcccaggccaatcctcacatttggctttgattagcctttatcaaattattctgcctcaacagacttaattttggtcaacaatttaactgaggtactttatagataacagtgtccattataccacaggaaatacttcagtgtttaaataatgagaaaagcaaaagctgttcccaatgacagctgctccccaactcaccacaaggcgaagtcttaccctgttgaaaactgtaacaaacctccatcagacaaagctaccaggtgaccataatggatcaaaatgaaattctgtaaccatgtctccgataacctaaaagaaaacagactccaaactttaaaaatgaccagaaatctcctaatatgacttgtgcttcttatgaattagtgttagtgccactctattctttctgcctcctagataagaactattagaattttccaaggatggaattgagttcacctaacagcatccaatacaaacacctcactttgttgaatggcaatgaaatcacctaaaagaaacacaaatcctataagaagtcctcttgagcaccctcttatggataaccctccgtcattgatgctttgtgttcatccttattacaactctttacatgccactctttgactataggtgtgattctagtggtctctggcaagatggcacagacaaaagcatgctttgttcctgtggtattctaaatgagaaattagattcatgagaaaaattgtgaccatgtaagaattttaaaaaattttttcctttacattttctttaacattttttaaagaaaaaaagtacttggacttatatgcaaatggtaatactgactcattatttagaatgtataatgaataacctgacaaaattacaaagttgacctgaaaatgcataattgcaatgggatattttaatatatattctcaggtaatggaaaatattaatacaatagttgttagtatacaagttgttttaaaagagttaataaaatatttctaagaaatacctgcagaagttgtttgataaaaatgcattgtttttatcatgtacaaacataattgagaatgtgcacatgatcacatttggctataattggaaattctcacgatctgcctgacctaagacatttgttttcacatagactgtgtcagagcagttactgcacaatgcaacagaggaacaagcccccatgttgttctatgtgactgtatcactgtagctgtcacagggaaatcaggaacacagttattaccagtattaacagaatgaagtgtttactatgcaaattagatcttgtttgaatataatctagagatgaggggagtcagaacaacagaaaatatcctcaaccatgacagttttaattagttgcctggtggattatgttgatgtgggtaatgttgttaactaaattttctagaatcttttttttttccatgttagaattcaccaatagcctaatgacatgaaagctgggaggcagaacttaagaaggctgcaaggggactgcgtggacaccggcctcctgcctgttttcctgatactttgtcctgacaatcaagagtttctttaaaacaccactgtctacttctgttttctcagacaggtagagttccacagatgtctccaccatcttcacatcaaagatataatttgcagtttggattttcctgcaagccctcatttgtccctatgcatctgtctgtctccacgcagatgggtccaaaacctgactaatgccttcttcagttctgccttccaactttcatgtcaggctactgctgaattccagcatggaatccaaaagggaatagattctagaaaatttagttcacgttacccataatcacatagcacaatctaagaggcacacctccaacctagattgtgttgtcctatcacagatcttacttcttaattcaaagtctatcatccatatcttggccagaaagaaaaagagcaaaatatggaaataatgtatataagactatattgtataaccttggcccactattcattagcaagggaaataaaataaggctcttctaaccaaaaagaagaaaggttttctcctgaggaaggtggaatatatatataatggataagggaaagccaatacctgccacaggatgccagtagaaaactcccagtaccaaactgtcatttttcaatggcccagaactattaaaacattttattaactgacttaaggaattttatttaaaaattttattaactgacttaaggaaaaaacactaccaattatacttctgcactatttcttaaagagtatttacagaataatctcacctcaatgttcatttatgaaaataagtaggaacccagagtgcagagatccactttaagaatgtggcactaagccaggcaacgcagcacacatctgtagtcccagctgctcaggaagctgaggtgggaggatctcatgagcctagaagtccgcggccagcctgggcaacatggcaagacccatctcaaaaaaaaaaataaaacaaaaaaactggcccagtgtggtggctcatacctataatcccagcactttgctgggctgaggtgggaggattacttgaggtcaggggagttggcgaccagcctgggcaagataatgttgcctgtctctacaaatatatacgtatatatatacatatataaaaatattttaaaataaaaatatattaaaaactaggaagaatcaaaaagggatgtggcactgataaatacatttataatattttttcatggcatgaattttctagagcattctacctgaattaagttatatcaggctttcctgtattacttacattcatgcaactaccctccagtatgaactttcatatcaactttgaaaatcgttaaaattgaaaaactttcgatatttacatttatagtttctattcagcgtgcactttcttcacatggtattgtaaggatgcacgccaaatgaaggcgttgccacaatccttacatttataaggtttctctccagtgtgcattctcatgtgcactcgaaagcctgtaaggaaactgaagggttttccacattctttacattcatagggtttctctccagtatgaattcgttcatgtatatgaatataactggaactactgaaggctttaccacactgtttacattcataaggtttctctccagtgtgggttctttcatgtatctggaaacctgcaagagtaatgtatgttttcccacattttttacattcatactgtttctttgcagtgtgcatcctttcatgtcttcgggcagaactgcaacaataaaaggctttcccacattccttacatttgtagggtttctctccagtatgagtcctttcatgtctttgagctgagtagtagtatctaaatgcttttccacattttttacactcaaagggtttatctccagtgtgagtactttcatgtgcttgaaaacctaaaggagacaagtaagttttcccacacagtttacattcatagtgtttctgtgcagtgtgattcctctcatgtttttgagcagtacagtggtaactgaaggctttcccacattccttgcatttgtagggtttctctccagtatgagtcttttcatgtctttgagcagagttgtgatatacgaacactttcccacattttttacattcatagggtttttctccagtgtgagttctttcatgtgcttgaaaacctacagaagatatgtaggtttttccacattgtttacattcatagcgtttctgtacagtgtgattcctttcatgtgctcgagcagaatggcggtaaatgaagggtttcccacattccttacatttgtagggtttctctccagtatgagccttttcatgtttttgagcagattggtggtatcggaatgcttttccacattctttacacttaaagggtttatctccagtgtgagtccttccatgtatttggaaagaacgttgacaactgaaggctttcccacaggccttacatttgtagactatccctgcactgtgtgttcttttatgttttttaaaagactgcagataactgaagggtttcccacatttcttacatttatatggcttctctccatattcctgacacttatacagtttgtgtctggtgtaagatctaatgtgcctgttaagggatgaatgatggctcaagacttttccacatacactgctttcccaaagctttcctccagaaggagttttcttgttcagactgagatttgcaatctggctgaaaccttctccgccatgactaccttctttactttcacagagtctctctaccatatgatttctgtaaaaaatgagtagcacattaatagttcattttttaaagattttctctttattaactgatactagaataactattttttccactttcagggaaagtacagatttttttgtcctgtctaaattgcttgtgaggtgaatgtactgaatgctatggccctgcaagagggctcaaacataactgttatgaaaacagtgattttcatatatgggtttctctttttttttttttttgagacggagtctcactctgtcacccaggctacactctgtcgcccaggctggagtgcagtggtgcgatcttggctcactgcaacctctgccacccgggttcaactgattctcctgcctcagcctcctgagtagcagggattacaggcacctgccattgcgcccggctactttttcactatgttgccgaggctggtcttgaactcctgacctcacaatccacccacctcggcttcccaaagtgctgggattataggcgggagccaccgcgcctggaccatgaacatctatgccatatttaagaaagcactttggggccaggcgtggtggctcacacctgtaatcccagcactttgggaggccgaggcgggcggatcacaaggtcaggagatcgagaccatcctggctaaacacagtgaaaccccgtctctactaaaaatacaaaaaattagccgggcgtggtggtgggcgcctgtagtcccagctactcgggaggctgaggcaggagaatggtgtgaacccaagaggcagagcttgcagtgagccgagatcacgccactgcactccagcttgggcgacagagcaagactccgtctcagaaaaaaaaaaaaaaaaaagaaaagaaagcactttgggttatttttatttatttatttttcccgagatggagcttcactcttgttgcccaggctacagtgcaatggcacaatctcggcttactgcagcctccgcctcccgggttaaagcgattctcctgcctcagcctccgaagtagctgggattacaggcatgtgccaccatgcccggctaattttgtatttttagtagagatggggtttctccatgttggtcaggctggtcttgaactcccgacctcaggtgatccggctgcctcagcttcccaaagtgctgggattacaggcatgagccactgcgctagctgggttaatattttctaagaacagatacatttgaggctcagcttgttttgtttctttaattatcaaatttaatgacatactaagatttttctcctagaatactgctttcttttctgagtgtgactcacctgagatttctcccctggtttttgtactgctcttcaatgttccattctttttgttttgttcctgaaatgcagacccagaaaaaattatcataaattattagaaattacagaaaaattattagattctaggtccatatgtgaccatgcctgatttacaaaagaattttgccttttcacattccacatcttggaatagcattgatatccaagaaaaaggtattctctaattcattcaacaacatgatggaatgatttcatttttacctatagtggccaggttcctgaaggtttcccacatcacgtctctgtagagttttttctgtgaaggatccagcaaagtccattcctcctgggtgaagttcacagccacatcttcaaaggtcactgagtcctaaaacattccaaatgtgtgtaaaggagaatgggtgagactgacagcactggacatctatactcgagtcataagatgttcacgatgattctgtgatctccagagatttattctatgaatttgttgtcagaactctaactctttggccacactccctcagtagtttatgaacacacgaaaattatttctacactttcactgtgatcacaatcatattgctttccaatggcaggatccagagcactctggaaaagtgagagaaatgctgtacaaaaaaattccattttaagaccatcaattctttgtgagaaaaactcatcttcttcttatacatcacatcactcaacattccatgagacacagggtcaaacatggataatacgtggatgaataaaagcacactgaagaactagaagctttttctactattcccatcactaagcatgagaacaagaggcacgtggaaatcaaacttgtaacaatatttacctgaccatattgtcctgaggtactctaggatattcgaggtagtcagatccagccaattcaatcaaaatatttcttttggagaagttggctgggcacaatggctcacacgtgtaatcctagcactttgggaggccgaggcgggcagattatctgagctcaagagttcgagaccagcctgggcaacatggtgaaaccctgtcttggtggctcacacctgtaatcccagcactttgggagaccgaggagggtggatcacctgaggtcgggggttccagaccagcctggctaaaatggtgaaaccccatctctactaaaaatacaaaattagctgggtgtggtggtgcatgcctataattccagctacttaggaggctgaggcaggagaatcacttgaatctgggaggtggagggtacagtgagccaagatcgcacattgcactccagcctgggcaacggagcgagactctgtctcaaaaaaaaaaaaaaattagctgggtgtagtggtgcgcatctctaatcccagctactcagggggctgaggcacgagaatagcttgagcctgggaggcagaggttgcagtgagctgagatagcaccacttctctccaccccagagaagtgttcattttcactatttgtgttaatatttatcagagacttatttctttctgtcccatttcatggagctattaagttactgggaagttagagctcaggcatgaggaataaagcatgacaactttagataaaatctctacacttctgagcctcagggatacttcctaccaatttttagcaaatatttgccatcctgagatggtaaaatgccaaaagagctctttccagcagaaccattccagttaaccttgggacttgctgaccttgaggaacaggttaagatttgcagtttacaggccaggcgcgttggctcacgcctgtaatcccagcactttggggggccgaggcaggcagatcacctgaggtcgggagtttgagaccagcctgaccaacatggagaaaccctgtctctactaataatacaaaattagctgggtgtggtagcacatgcctgtaatcccagctactagggaggctgaggcaggataattgcttgaacctgggagacagaggttgccgtgagcctagatcgcaccattgcactccagcctgggcaataagagtgaaactccatctcaaaaaaaaaaaaaaacagatttgcaatttacaataaagtgcattaaagtccacaatgatatgatgaattttcacatgattataaaatgtataaaaggttctcagcagaggtttcctccaaaagaacataaaatgccctttctccaatttaagaaggaagtgattccccagccactctagagaagagggataagagttgaattgaacttcttttcagaaaccatacgagaaagtagagtgaaatatttaaagttctgaaagaaaaaatctgtatcaagcaaaattatccttcaaatgagtccgtagtactttctgagacaaaaattgagggaatctgtcaccagtacacctgctttgcaagaaatgttaaattcaccagaaagaaagtaaataacaaagaaaggtactgcaatagaaaaggcataagtggaagcaaaatataatcattttctcatccttgattaatgtgacagataacaggttgttcaaagtaataatagctacaacatataagtacagtttatggataagtgaaatgagtaacagcattgttatgagggaggaattgggaatactctattatgagttacttgggcaaccagtgaagtggcctaagattgctagaaagagggcttgggatagctgtatactgaaaactcaagggcaaccattaaaatagtgtaaaaaaaaaaagtataatcaatatgttaagagagggaaaaaatgaaatcaggtaaggtaaagagtcaaacactgaagtcacaaagaaaattaaaaagtatgtaatctacaagtaaactacctaattatatgttgcctacaagaaactttttttttttttttttttttttttgagagacagagtctcactctgtctcccaggctagaatgcactggcacaatcttggctcactgcaacctccgcctccagggtttaagcgattctcctgcctcagcttcccaagtagctgggactatgggcgtgtgccaccacacccagctaattttttattttttagtagagacagggttttggtttacgttggccagctagtctcgaactcctgaccttaggtgatgtgcccgcctcagccgcccgaagtgctgggattacaggcgtaagccactgcacctggcttttttttttttttttttttgagacagaattgtgctctgttgcccaggctggagtgcagaggtgtggtctcagctcactgcaaccttcgactcttgggttcaagtgattctcctgtctcagcctcctgagtagctgggattacaggcacatgccaccacacctggctaatttttgtatttttagtagagagagggttttgtcatgttggccaggctggtctcaaactcctgacttcaggtgatccacctgccttggcctcccaaagtgctggtattacaggcgtgagccactgtacccgcccaaggagttgattctctaagaagacgtagagaatctatgtataatctttagcgtacatgtgcataacaaaagaactgcaaaatgcacaaggcaaaatgtgataggactacaaggagagatacatgaatccatgactatggttgagatttcaacaccctcctaccagtaattaagagatccagtaggcagaaaaaaaaacaggaaggacaggccgagtacagtggctcacgcctataatcccagcactttggggatgctgaggtagggggatcgcttgaagccaggagtttgagaccagcatggccaactagcaaaacccatctctacttaaaatacaaaaattagccaggcgtggtggcaggtgcctgtaatcccagctactcgggaggctgatgcaggagaatcgcttgaacccgggaggcaggggttacagtgggcccagatcgcaccactgcactccagcctgggtgacacagcgagactctgtctcgaaaaaggaaaaaataagaaggacacaggtgaactgaatagcaccaaacaatagattccactgaaatacatggaatccttcatccaactacagcagtatacacatacttctcaagttcacatggaacagtcaccaagataagatagactacattgtgggacataaaacaaacctaatccagaagatcacagcagattaaaaaaaaaaaacactttaacaaacttgaaagaaaaattatataaaatatgcttgcagactacaatgacaatataaaaatcaataacaaaaaaacagttgaaaaacctcaaaatacttgcagattaaaccacacacctctaaacgacccacggatgaaagtagtagttttaagggcacttaaaaactagttttttcctttttaaagattttttccttttgtgttaaaaagcagccctcaaaatctcatagaactatttttacctaaatgaatgaaaggctgggcctggtggctcacacgtgcaatcccagcactttggaggccaaggtgggccgactgcctgaggtcaggagttcgagactactctggccaacctggtgaaaccctgtctctactaaaaatacaaaaaaatcagacaagaatggtggcatgcacctgtaatctcagctacttgggaggctgaggcgggggaattgcttgaaccagggaagtggaggttgcagtgagccgcaatcgcaccactgcactccagcctgggcgacagagcgagactccatctcaaaaataataataataataataaaataaaaaataaatgaatgaaaatacagcttattaaactttgtaggggctaggcgtggtggctcacgcctataatcccagcactttgggaggctgaggtggatggatcacttgaggtcaagagttcgagaccagcctggggcaacctggcaaaaccccatctttactaaaaatacaaaaaaattagccaggcatggtggcacatgcctgtaatcccagctacttgggaggctgaggcacgggaatcacttgaacctgggaggcagaggttgtggtgaaccaagatcgtgccactgcactccagcctgggtgacagagtgagactccgtctcaaaacacacacacacacacacacacacacacacacacacacacacccctttgtgggacacagcaaaagtatatacatagaggacaagtatgctactgaacatatacactagaaaggaagaaaaatatataatcaattatctaagcatgtgctttaggaaattagaaaaagcaaattaaaaccatagtaagcaaaagaaaagaaattttttcaaatagtgaaactgcaagaaataaaaaaaaaatcaaaaccaaaagccagctctttgaaaagatgaataaaattgattaaaaaatctagtcaagctaactgaggaaaacaaagaggacagaaattactaatatcacaaatgaaaaggaaaatgaaaatgagaaagcatttggctaagtacaacttccatttatgacagcaaactagcaatagagagaaactactgcttaagaaagaacatctacaagaaacttacagctaacatcatacttaatagtgaaaaacaagatgctttcccagtaagatgaagaacaaggcaagggagtcctctcacacagcatttctattcaacatgggactggcacatagtgtggggttgcatcagaagcctgtggacaacttatgaccatctggctacctgcagggccacaagaagggggtgctaaagcctacgtagtctggccgggcacggtggctcattcctgtaatgccagcacttcgggagtccaaggtgggcggatcacctgaggtcaggagttcaagaccaacctcaacatggagaaaccccgtctctactaaaaatacaaaattagccaggcgtggtgacacgtgcctgtaatcccagctactagggaggctgaggcaggagaattgcttgaacctggggaggcggaggttgcagtgagccgagatcacaccattgcactccagcctgggcaacaagagcgaaactctgtctcaaaaaaaaaaaaaaaaaaaaaaaaaaacagcctacatagtaaaggagtcagagggcattaattgcatggcaatttgaatagtctagaagcctctgtggtaaaaatacccattcaaggtgggccaacccgcaagtcacagcataactggatttaattaaaatttgcgcacaaggattatgttgcctccagcagaacaaagaacaaaagaatctgaaagatattatgatggtgagaaagtcaatagctatttcttagcctggccaacatggtgaaacctcatctctactaaaactacaaaaaaattagccaggcatggtggtgtatgcctgtaatcccagctactcaggaggctgaggcaggggaattgctggaacctgggaggcggagattgcagtgagccgagatccactgcactccagcctgggtgacagagagatcctgtctcaaaatacaaaaacaaaaacacgctatttcttcactatgtcagagaggatgcggtcctctgcttaccacataattttcaggaatttagccaaggtgtcagtgcctcttacattctagatggggcaatagcccttccactttttgtaagctcttttctttcaatatttgtatgtcttgaatgaatgtcaaatgactgtccccagagagcaattactctttttttttttttttttttttgagacggagtcttgctctgtcacccaggctggagtgcagtggtacaatcttggctcactgcaaccaacctctgcctcccaggttcaagtgattcttgtgcctcagcctcccaagtagctgggattacaggcgctcaccatcacaccgggcaaatttttgcattttttaaagtagggacaggtttttgccatgttggccaggctggtctcaaattcctgacctcgagtgatcttcccacctcagcctcccacaggtgtgggattacaggcatgagccactgctcctggccagcaatgactctaacataatgccatgcctgtgctcctgaagaaaggtagataaaatttagatcttgccagcaaagactgcaatatcaaggctactgaggttccctgaatagaaaccagataaaggtggaccacatcccttcaaaggtgaaggtaaactgcagctaagtctgttgaaatagagactgaacaaaacctatacaaatctgtgactacagaatatctaccacttgttcattggatggaatcagtaatctccataatgttggatattgggtgtaggggctcaataggttgggattacagcagtaaattgcaacagtccactttgaggcacccagatttaagaacaagccaaattaggctgggtgcggtggctcacacctataatcccagcactttgggaggttgaggagggtagatcacctgaggtcaggagttcgagaccagcctggccaacatggtgaaaccccgtctttacttaaaaaaatacaaaaattggccaggcgtggtggctcgtgcctgtaatcccagcattttgggaggccggggcaggtggatcacgaggtcaggagtttgagagcagcctggccaacatggtgaaactccgtctctactaaaaatataaaaattaaaaatataaaaattaaccgggcgtggtggcaggtgcctgtaatcccagctacctgggaggctgaggcaggagaatcatttgaaaccggatgatggaggctgcagtgagccgagatcgcgccactgcactccagccccggcaacagcaaaactctgtctcaaaaaaaaaaaaaaaaaaaaaattcaactgggcattgtggtgcacgcctgtaatcccagctactcgggaggccaaggcagaagaatcacttgaacccggctggtggagattacagtgagccaagattgcgccactgcactctagcctgggcgatagagcgaaactctatctcaaaacaaaaaaacaaaaacaaacaaaaaaaacaggccaggccaaattaggctgttaaaaggagaaatactcggccaagtgcagtggctcatgtccgtaatcccagcactttgggaggctgaggtaggaggactgcttgagcccaggagttcaagaccagcctggacaacatagtgagatctcatctctacaaaaaaaaaaaaaaaaaaaaaaaaattagctgagcatggtggcgcacctgtggtctcagcttctcaggaagctgatgcaggaggatgcttcagcccagatgttggaggctgcagtgagctgtgattgcatcactggattccagcgtgggcaacagagtgagatcttgtctcaaaaaaaaaaaaaaaaaaaaaaaaaaagcactggggataactgccccttcactacaaccatacaaccattaatggttttgtataatagctgtcaatccttcaaggcccatcaatttacattgagtcatattaactaatttaattggggagtaagtttcatggggtcccattttgtcaatctaatttgtaactgccaaatacctaatttgaatttatggccaggtgcagtggctcatgcctgtaattccagcacactgggaggccacagcaggtgaatcacttgcggccaggagtttgagaccagcctagccaacatggcaaaacctcgtctctacgaaaaacacaagaattagatgggcgtggtggcaagtgcctgcaatcccaactactcaggaggctgaggcaggaaaattgcttaaacctgagaggcggaggctgcagtgagctgagatcccgccatgcactccagcctaggtgacagagcgagactctgtctcaataaataaataaataaataactcactggttcagagcttccttggtcactgtgggattttttaagggctgttgtctcaccctgtcacccaggctggagtgcagtggcacagtcacagctcactgcagcctcaacctcccaggcgcaagctaccctcccacctcagcctcccaagcagccaggactacaggtgcgtgccactacacccggctaatttttgtattttttgtagacacagggtcccaccatgttgcccaggctcgtcttgaactcatgggctccagcaatccacctaccttggcctcccaaagtgctgggattacaggcatgagccaccgcacctggccctatgtgatattttaagacaatttgttctataatacaaccaagaatgacttagccaacacaatagttatgatggctaaggagaggcacagggatttctgctctatttattttatattcactaattcctctatgattatcaggataccttcattaaatttgatgggatacccaggtataactataacatgagccctagtattaatcccatgaaggtttatcaactgatacagatgttaaaattcagaacctacattatagaggccaaaaacccaaggagtgccctttttatgatttttgttatgcaaattcctttaatacatttccaactgggtcaaactgtggacttctgtttcatcagtgtttttttattttgttccttcccttccctgctttgttttttggttactggatgtactctgggggagggtgtgtcctctctaacctggtactaatattttttttccccaccagagagcctgtgtcatcagggtgtcatcactgtcatcagggtgaagcacctcccctacggcaatggttgctctagaaggtttaagaaccccaggtttaagtcaggtttgaactaacttctttgttatgccacaactatgccatgggtgttatcccccactaaacccaaaggtcaagctctctgttgtgggagaggcgcatgaagcagcagcaatagcactttagggtcttgggaaagcttctgctgttaaagagtgtggactcagtccatcatctaatggctgctgttccccaccttccctccctgtcctctttttgaaggactgctcttccaggggcagccacataatgaccaacctctgacagtgtatacagtcccccctccactcccactctttacatttggggcaacccaggcatcagtcacaacttcactataaatacacaggtctcaggccgccactgcgagaggagccgccaccatgtccgcgcatctgcaatggatggtcgtgcagaactgctccagtttctgatcaagaggactatgccgacctacagcaccaagcccagtaacttgaaggccccagctccttccgctacaacgggctgattcaccacaagactgtgggcgtggagccggcagccgaggacaaaggtgtggtggtggtcacgaagcagagatccggccagccgaagcctgccacctcctacgcgcggaccaccatcaacaagaatgctggcgtcacgctcagcagcatcagacacatgatcctcaagaacaagtaccgccccgacctgcgcatggcagccatccgcagggtcagcgccatcctgtgcagccagaagcctgtgatggtgaagcggaagcggacccgcgccaccaagagctcctgagccccctgcccccaaagcaataaagagtcagctggctttctcaccaccagcccctcatgcccgcaaaaaacaaaaacaaaaacaaaaaaacaaaacaaaaacacaggtaggtccttgcccaggatgtaaacccaggaccactttaaggaaggccctactcccatactccagctccccaattccaaggaattatcaaaaactgtcaactaaagtcagctgaacctagaaccagacttggtagggctcaacaatggaagaaacacagagcagcacagcacaaagcatgtgctcccagtaagcagcagctcaaactctaaatgggccatagagcaggtcagcaattcagaacaagagaagatagacccatgagtggtggtcaatatctagacatcttgttcacagcaccaactgctagtcacctagaagggcgaggctgcaatgatgacactgatgacagtgggtctcacacacactgagagggtatgaaaaggcttattactcccatgactgacgtctctagggagaacagggcaggcctctcaagcaggtgggaaatggcttaaaaaagcaaggaagggaacttgcccagggtgtttactgtggttggaagtggggctgggcgcaagttcctctgcatgggcagctggttatgtggtttgagtctcctgcccatgacagaggaaggatgcccaggccttctcagcttgtccagaagtagggcattaagggaagaggatgaagtggtcaattgtgaaacattaaaaatgtagagtccaaccactaattacaagaacaatgttgaacagggccaggcatagtggctctggtggctcacgcttgcaatcccaatgctttggaaggccaaagtggaggatcgcttgagcccaggagttcaagaccagcctgagcaacatagccagaccccatctctatataaaaaatgaagtagctgggtgtgctggcatgtgactgtagtcctagctactcaggaggctgagatgggagaatcacttgagctcagttcaaggttacagagagctatgattgcactactgcactccagcctggatgacagagcaagaccatgtcctctgtctctaacaataacaacaacaacaaaaaagacaatgtgttcaacaatagtgaataggaaaaatacgcatttacaattgcttgtttttatataaagaaacactaacagatgcacaagttattatcaaaactggttatctgggggtggctggagcaagagcactagggtaaaccaggatattctagcagtaagttttctcaacccacactttcttttagatttttttaaacctttgtgtgtattttaaatgattgaaaaaaattatataaaccatactttactattagccattatttttaattaacttgtttctaaaatttattgacttttaactttttttaaacataggaaaccattgtaagatttcatcctttaaataatgggtataaaagtgtaaattaagaaaaaaatctctaactaaatgacaaattgcatcatattttatctttctactgtatcccagagggcagtgctttcaggaatgagtagcctatttaaagcatgatggatttaaacctaactctaaatgtaaaaaagtctcaaagattacataagttttgagtagtttccatcgtatcattaaaataggaactcaattgaattttcatcttatcaattaaaataaaaattcatttttctttttcttttttctctttttttggtggagtctcactttgatgcccaggctggagtgcaatggtgtgacctcagctcactgcaacctccgtctcccaggttcaagcaattctcctgcctcagcctcccgagtagctgagattacaggcgcacaccaccacaccaggctaatttttgtatttttagtagagacagggtttcactgtgttagccaggatggttttgatctcctgacctcatgatctgcccgcctcgacctcccaaagtgttgggattacaggcctgagccactgcacccggcccaaaattcatttttcttaaagagtagagccttttaaatgtcacatcctctagggcatatgcacatacaaaactgacttaaaaatgaaaaatgtacccgagaacttcaatgcactcatcttgcatcttaagattcttttgcacaaaaggaacacaattctgcttggttccagaattgtcttgccttacatcatatttatcaactttcattttcaaagccaaagaaacgaaaatcctacacactcacatgtataaattacaaaatgctaagggaaactacagttgaagcaccacaataaacagaaaaaggaaaccaaaggaaagaaacacaaatattctaatcagcttagcagcctgcttccccacaattcagaattgtaaaatccacacacagaaggtcaaacaccctaacaagctgggggttcagactctcaccattaaggtgtaacacctagagtagttcagtcccagattcagtttaaggttctgacccaaatgaactctcaaattcatcaatctttttttttttttttccggagacggagtttcactcttgttgcccaggctggagtgcaatggcgcaatctcccgctcaccgcaacctccatctcatgggttcaagcaattctcctgcctcagcctcctgagcagctgggattacaggcatgtggcaccacacccaactaattttgtatttttagtagagacggggtttctccatgttggtcagggtggtctcgaagtcccgacctcaggtgatccgcccgcctcagcctcccaaagtgctgggattacaggcatgagccaccatgcctggcttcaaattcatcaatcttagatccaggagacaaaagtcctaacttcacagactttctcaacatgtaaatattacactctgaatgcagcaacactggggatgcaaaacagaaggctgggagtggtggctcatgcctgtgatcccagcacctggcaggccaagatgggagtccctgaggctacaagtttgagaccagcttgggcaatgtatcaaaaccctgtctctacaaaaaacaaaaaacaaaaaaacaaaaaaattagcgctgggtgcagtggctcacgcctgtaatcccagcactttgggaggccgaggcgggcggatcacgaggtcaggagatcgagaccatcctggctaacatggtgaaaccccgtctctactaaaaatacaaaaaattagctggacatggtggcaggcgcctgtagtcccagctacttgggaggctgaggaaggagaatggcgtaaacccaggaggcagagcttccagtgagccgagatggcaccactgcactccagcctgggcgatagagcgagactccgtctcaaaaaaaaaaaaaaaaaaattagccaagcatgatagcatgtgcctgtagtcctagctacttgggaggctgaggtgggaggatcacttgagcccaggaggctgcagtgagccaagactgtgccactgcaccccagcctgggtgacagagtaagaccctgtatcaaacgaaacaacaactacccctcaaatccactgtctaaaaacaggcccaaggaaactacaattacaaccccagaagtatcacgctgttcccctccccaccacgtacatgtggatccccagttttccaatgctcagtttctgtcagtaccaaaggggtctttccttgataggtgtgagtatgtaggacacctgctctccttgataagcgtgagtacgtaggacacctgcaggggaagcaccctaaggagaaccacctgggtcttaattacttcccttggcagagtcaaaggtggccttaccttctagtcactgcctcaggcctccgctcactagtcatgcggctttagaacacttttgatattttaaatgagaaaaacccagtgtttcaagaattcagcaaaatcactcaaaccaagtatttatgtataaagcatggaagcaaactgtaaaacattatctagtttcaaaacaaaacccacaaatatctattccttttggaaaatgaagttaattataaatgattatttaatcactagtcaaactattaatcattaatcatgataaactataatcattagtcaaactaataatgtaatcaatagttaattattataaacaatttttttttagagggggtctcactctgtcacccaggttggagtgcagtggcacaatcttggctcactgcaacctccaccttgcaggctcaagcgatcctcccacctcagcctccaaaataggtgggaccacaggcacgcaccactatgcctgactaattttttgtattttttgttagagacagggtttcgccatgttgcccaggctggtctggagctcctgagctcaggagatccacctgccttggcctcccaaaatgctggggttacaggcatgagtcactgtgcccagccagaagtggttttctaaacaatcatattttaacacacctaggaattgtaagtctaagccctggaattcctcttgaaatcaaccaaaagaaaaaaacgagcctcagaaacttagaagaaaaaggggttaaaataatatttaggctaggcacagtggctcatgcccgtaatcccaacattttgggaggatcacttgagctcaggagttcgagaccagcctgggcaacataaagaggcacgctctctacaaaaaattagctgggtgtggtggtcccagctactcgggaggctgaagtgggaagatcggttgagatggggaggtcgaagctgcagtaagccttgatccccccagtgcattcaagcctcagcgagagggagacactgtctcaaacaaacaaacaaaaaaagcaggatgtaatactggatttcttttttccagaaattcacctttcttggcctttttggaaatattttgtaccatccttcacgctctagtgattgaacacaccttacatttacctaaatactaacacacaatcgagtcgacgttttcaaggtgataaagccggggaggctcagtgctgatccgcaactatgctcaaggacagatcacccagaaaaatttccaaagaggatcctcaacacgtaagatgtctgtgccaaggaaagatactgggaggtgaggcacaaccatttcatacaactaacttccaagctgctatctctgctttcctctctcgtaaaatatccacgaacaacaacaaaattaaatctaaaagactaatcctttgctctgtggaaaatagattattaaaacacagtaagttttccctaaaagtcgtcgagagggtcttagaaactgcgactttatggtataacaaaacctatttgtttccttatcaacgatgtaaggaacattctagaacctggtgcacgtcgtttcgctaaagttgcacccaaggcgggaattctccccatgaccctcccatggtccccgcacaatctgggggagacgcgggcctgcgggcgcggagctgcccagagagggctctggggctgggggcgaagtcaccacgcagggacaggacaggacgcccggggtcccgactgccggccggaccagggccaccctgcggccaaggggaccgagggccgagctgtgccatggggactagagccccagaccccggagtcgcccgcagggaggcccgggtcccgccacagccggtcccagccagcccctcctcccgcgtgtcgggaccccagcccggcacactcaccatttcctggactccagggtgtcccagcatcctcctgatggctctcctggccacagcagggcaaatcgcgacacaccctgagctgacacaccctcagcactttcagagaagccgagagcgacccgagggcgccaaggcgagagggaaaaaaaacccaaacccacgggctttagcgcgtcgccccgcctgctgccctacagcacgcctgattggactgttggcacggccccgccctcagaacccctaattggatagtgccctaggcccctccccctggggtgggggacacagtgcagagaggagaggtaaggcaagcgcctgagaggggccagaatgacagattcttgaccattgcccttgccagcttgggcatcctccctgatccattttcccctatcaataagttaaatgagtccaagatcctcaaacctattgtttaaataagaaaccagcaggacatgccctcgccagaggacattggaatttaagaacttgctcctggctttccagagctggcactggcgtctccctgtactaatgggactttctttcttcttcctcttggacaaaagggaattgcattctcagtggccaaaggaacgatcctcgtgcctcagagcaggaggggtgcctagaccaggtcacactggaacatgggagagggcttgatgtcctccaggggtcaggaatttggaaagaaaggctgttggtggcatggcgaaggcttcctcacaccttatccctcagtctactcattttttcttttttcttttttttttttttgagacagagtcttgctctgtcgcccaggctggagtgcagtggcgtggcatgatctcgggtcactgcaacctctgcctcacgggttcaagcaattctcctgcctcagcctcctgagtagctgagattacaggcacccaccaccacaccaggctaatttttgtattttagtagagacggagtttcaccttgttggtcaggctggtctcgaactcctgacctcaaatgatccacctgccttggccttgcaaagtgctgggattacaggagtgagccaccgtgcccggcctgcctactcattttcagccaaaaaattaaaacacaccaacaagggaatacagttatttaatatatgggaaaaaggggagttatatgacagcaatattctataaaggaataaaaacggaagaaaaggaaacatctgaattggttcatttaagcagtctacactgcactaccatttacaaggaaaacgccaagtgacaaacatattcccaagctggggagtcagactctgttgaaaggggcccaagagtctatcagtccctggtgatgaggcagagaaacctaaggatttaactctgggagctcaacatgtcctcctgttcccacctcatgtgggaacaatcttcccttcaagatctttattttcaaaagcaagaaactctcacctggagtcagtttaaggttctgccctaaactgtcaactttataaacccttcttctaggagacaacccaaatgagacttagtctctaagtctcaccttgacagattgtcttttttttttttttaatttttgagacagagtcttgctctgtcaaccaggctggagtacagtggtgtgatctcggttcactgcaaactctgcctcccaggttcaagcgattctcctgtctcagcctcccaagaagctgggattacaggcgagcgtgaccacacctggctaatttttgtatttttaacagagacagggtttcaccatgttggccaggctagtctcaaactcctaacctcaggtgatccgcctgcctcggcctcccaaagtgctgggattacatgggcctttggtgttcttacacacacacacagacacacacacacacacacacacacacacacacacacaagctccttccccaccccagtcacaaagatactctcctacatctgatgctaactttgtatttttgcttttcatcattttagtgttaattttcacatatgatatgagataaaggtctcagttcatctttctgcaggttaatatccagttgtcccagcaccatgttgaaaacgctttccccattatcttggggcatttgtagaaaatcaacagaccataaatgaagattatttctggtctctctattctgttctactggtctatgtctaacattatactagtaaatctggctaatctactacctgccctgttgatggatggccccatttcattccacatgattgccttgcaggtccagaaatggtttcagagccaggagaaaatctctttattattatttaacttacactgttatttattttgagacagggtctcactctgtcacccaggctggagtacagaggcatgatcatagctcaccacagcctcaaactcctgggttcaagttatcctcccacccagtaactgggactacaagcacatgtcagcatgcctggctaatttttttttttttttttttctgagacagggtcttgctctgttgcctaggctggcgtgcaatggcacaatcatggctcactccaatctcaccctgccaagctcaagcaatccttccacctcagcttcccgaatagctgagactacaggcgtgcaccactaccccaactaatttttaaaattatctgtagacacatggtctccctatgttgctgagactagtctcaaattcctagactcaagtgatcctcctgccttagcctcccaaagtgttgggattacaggcttgagccaccatgcctgggcccctggctatgagaatctgggaagcactccaaccacaagtaaatagttcatccacacctggatactccaaaatcactgcaccctggatacactgactgtctgcccagcaaggagagtgagcgaccactgctggaaaatactgcttttatgtgcatgacatgagaaaaattgtgtctagtttacacattctaaaaaagaaggccgggcacagtggctcacgcctgtaatcccagcactttgggaggccaaggcagatggatcacaaggtcaggagattgagaccatcctggctaacacggtgaaaccctgtctctactaaaaatacaaaattagccaggcatggcggcgggtgcctgtaatcccagctactcgggaggctgaggcaggagaatcacttgaacccaggaggcagaggttgcagtgagccgagatagcaccattgcactccagcctgggcaacaagagtgaaactccatctcaaaaaataaaataaaataaaataagagatggagtctcactatgttccccaggctggtcttgaactcctggcctcaagcgatcctcccacctcagcctcccaaagtgctggaattacagatgttgtgtcaccacacctggccaatagttataaatgttataacatttctttgatgatgcaaattttctggagcactatacatgagttaatttggattggattttcccaaattacttacattatgggatttctccccaatgagcactgggatgaggagacttcaatccaccaaagttgtatatatatatatccatggaggtgatacttaggtcatctcatcagaaaacactcatacttgtccacaaatagatgttgcatatggcattagtaccatcctcagaaatttatatatatttgcaagaaatattattttaagtcaatagtatatgctatcatgaatacaggatatgctcactccataagcagcaaattgactccttcacagttttaatagatttccagttgttttgtcttcagtctcctaagaagacaatgctataatctccaaccacattatttgcttcttccatcccattcttcatattgatcattgttgtgtgacattagttgactactgtaatgataaataactagggtaaaatagatacatttgctctttcttaggttccattcctcctttcagtgggaagcctcacacacactctcatcatgctctgctatgaaacatagcttaaccaagaatcgtatatccagcaaagctcatgttcaatacaaaacaaaaatttaatttttctgttatgctgatgaaaaagtgtaagtgatgttcttgccttctaacactgttatcgctgccacagccacttggtcaaggatcatcaagcagattaaggcaatttacacccatttcaactttttttttttcttcttgagaccgagtctcactctgtcacccagactggagtgcagtggtaggatcttggctcactgcaacctctgcctcctgggttcaagtgattctcctgcctcagccttccaagtagctgggactacatgcgcatgacaccaggcccagctaatttttgtatttttagtagagatggggtttcaccatgttgaccaggctggtatcaaacttttgacctcaagttgatccatctgcctcagcctcctaaagtgctaggattacaggtgtgaacaagtgtgcccagccccacctcaatatttatacaatttatgttgccttgattctaaccctgactgtaccacagtgtacttatggaagagcttcacaattgcagatgcaactgtgcttactgcagaggctgtagatgccctaaagcccaggacacccaaagcatattggaagccattggagtgagggagtaagtgatttcaggggtttccccaagactgatacagcagtcaggaatatcttaaatgttgcaaagaaagttggtggaaaggaaactgaagatatactgaaatcctctacaagtgatgatgatgatgatgatgatgatgatgatgctgctgatgatgcagaagattaagaagaggagcagtgccattgatttggacacgcgaaaaatttgcagcagatcttggggcatctatagcctctgcaagttgcaagtgttaaagataatcaacctcagctaacatcctttgattgaaaaaagcttctgtgtcatataagggaaaatatgctaatgaacactaaggtttttttagggattcaaagaaaaagaactagcttcctaaaacaatgcttctaactaaatatctgcaaatatgaagacatacccttcaacacaaacatcttcagccctcaagctgaacagatgctgacattagtattagcctcctgcaaagagtcaacatcttcaatcagaacctgggtcttccaacatagatgaaggtcttgatgtcctgtcaagattcaagttagcctgaggtctcactgtttatctatgatgccacacatctagtcacctctacacatcacattaggcaccatacagcaatcatcattgtcataaccatcgtaatacttgggttatcaagagagaagaaccagaattgtggttggtgttaacacattctttcaggtcattagacaaaagtaatctgagtattgaaacaagaaactgtaacattataggtgatatatacgatgtagataggcctgcaatggttgggtctgtactgaacacatatagattttttttcttatgattccctaaacaatacaactatgtacacagcttttacaatgcatgagatattttaattaatctagacatttatagagtatacaggagaatgtgggtaggtacatgcgaatattccattttataaaagagctggcatctgtggatttaggtatactcagggtgtactggaaccaatcttcttgcatatagcaggcagcaactctatttgaaagaaatggaaacttttttttttttttttgagatggagtctcgctctagcacccaagctggagtgcagtagtgcaatctcggctcactgcaacctccacctcccgggttcaagggattctcctgcctcagcctcctgagtagctaggactacaggtgtgagcaactatgcctggctatttttttttttttccgtatttttagtagagacagggtttcccatgttagccaggctggtctcgatctcctggcctcgtgatctgccctcctcggcctctcaaagtgctgggattacaggtgtgagccgctgcgcccagcctggaaacttcttaaggctttaccacgtttacattcacaggatttatttctttcaagtatctgaatgtgataaaaccaatgaatgctttcccacattccatacacttatagaatatccttccagtgtgtccttttatgtctattaaaggaactgagagaactgaaggctttcccacattccttacattcatagggcttctctccagtgtgagttctttcatgttctcgacagaaactggaacgactgaaggctttaccacagtgtttacattcatagggtctttctccagtgtgagtcctttcatgtcttagaaggaaagagggccaaaagaatgctttcctgcattgcttacattcatatggcttctctgccgtgtgagtcctttcatgagtttttaagtaactgaaacgactgaaggctttgccacaaatttgacactcataagatttttcttcactgtgagtcctttcatggcgacaaaagtatttaaaagaactaaatgctttcccacactccttacattcataaggctcctcttcactgtgtgttgtttcatgactttgaaaggaaaataaatcactaaaagcttttccacatttacatttatagggttgctctccagtgtgtgttgtttcatgttttcgaagggaactggaagtacggaaggctttcccacattgcttgcattcatagggtttctctccagtgtgagtcctttcatgtctttgaaatacactaggagaatcaaaggctttcccacatactgtgcatttatgagggccatctccagtgtgtgccatcatgtgtcttcgaaagcttgagcgatgagataacaatttcccacattgcttacattcatagggtttctctagagtgtgagttccttcatgaattcgtgctgaaccaggaaaatcaaagcctttcccacatatcttacatttatgaggtccatctccactgtgcattatcatgtgtctttgaaagcttccaagatgacaaaacgctttcccacactgtttacatgtatagggtttctctccagtgtgaattctttcatgtactcgaagggaaccggaaacactgaaggctttcccacattgtttacatttgtagggtttctctccagtgtgagttctttcatgtcttagatatgaactgtaatcagggaaggctttagaacactgcttacattcatacggtttctccccagtgtgtattttttcatgtcttagataggaactgtaaacagggaaggctttagaacactgcttacattcatatggtttctctccagtgtgagttctttcatgcatacgtaataaactgggccaaaaaaaggctttcccacacaattcacatttataaggtccatctccaccttttactaccatatgtcttcgaaggtttccaggagaactgaaggtttttccacattccttacaatcatagggtttctttccagtgtgaggcctttcacatgtttgaaaggagtggcgataacttaagcctttcccacactgcttatgtgtatatgacttctctgcatattcatgacactcccggtgtttgtgtccagtatcaactctgatgtagcaattcagggatgaatgacccattatgacttctccattcacactgcttccacatgcatctactctggcgggagtgttcttgtttacaatactatttcgaatctggcttaaggtttctccacactgactaccatctttacttttaccaaatctctctaccacatcacacctgtaaaaaatgaaaagtacattactaaaggtttattattgaatttatatttatcaacaggtattagatttacatttttaacattatcaggcaagctataagcttcatgtcctgcttcaatgtgaatggactgaatgttgtgcaagataactcaatcccagctattttcaagacaatgatatgcacatggggattcttaattcttttttttttttttttttttttttgagatggagtctccctctgtcatcaggctggagtgcagctggtgctgtctcggcttgctgcaacctccgcctcccaggttcaagtgattctcctgcctcagcctcccaagtagctgggactacaggcatgcaccaccacacccagctaatttttgtgtatttttagtagagatggggtttcaccatgttggccaggttggtctcgatctcctgacctcgtggatccacccacctcggcctcccaaagtgctgggattacaggcataagccactgcgcctggccttttttttttttttaagacagggtcttgctctgtcacttaggttagagtgcaccagtgccatcacagatcactgcagcctcaaactcccaggctcaagtgatcctcctgtctcagcctcccaaagtgctgggattgcgggcatgagctaccacacccagcctcatatgggaaatcttaatattgtttccatgggaactactttgcaaacactgaatagctatgtcacatttaataatatatttatgtcacatttaataatatatttttatagagaaatttttctaagaataaataaatttaagctgggcttgttcataatctttgcttctttttaaaagttcttgtcattctcagaaacactgcaaggacatcacctgtctcttataagtacaaattaccttggatttctcctgagattttggtgctgatcatcaatgttctggttttcccatttcattcctaaaagagagatccagaaaattcactataaattattacaaaatgatacaaaaattgttaagattttatgtacactacaatcatgtatgattcattcattgaactatagttgactcctgaacaacacaggtttgaactgcacaagtccatttatatataaatgttcttcagtctctgctacccctgagacagcaatatcaacccctcttcttagttagcctactcaatgtgaagatgaggatgaaaaccttcatgatgatccatttcaacttaatgcagagtaaatatagtttttcttccttaagattttcttattaatatttactttctctaggccgggcatagtggctcatgcctgtaatcccagcactttgggaggccgaggtgggcagatcacaaggtcaggagatcgagaccatcctggctaacatgttgaaaccctgtctctactaaaaatacaaaaaattagctgggcatggtggcgggcgcctgtagtcccagctactcaggaggctgaggcaagaatggtgtgaacccgggaggcggagcttgtagtgagccaagatggagccactgcactccagcctgggcgacagagcaagactccatctcaaaaaaaaagaaaaaaaatttactttctctaacttactttattctgagaatacagtatgcaatacatatgacatatatgtgctcgtcacttgtttatatgactgataaggctgctggtcaaaagtaggttaagctgtggcagacaaaagattatatgaggacatacaacaggttggggcctggcacttcaccctgtgttgttcaggaatgaactgtatcccttttccatatttcaaatcactgaacagcattgatgaccacaaaacaaatgtctctaattgaccaaatgaagacatgatgtcatccatacctatacagttcaggttcctaatggtttctcgcatcacatctctgtagagattcttctgtgatggacccagcaaagcccactcctcatgggtgaagttcacagccacatcctcaaaggccactgagtcctgaaacatcccatatgtccagaaaaggaaggttgaaactcacagtactgagaacctatactcaccttcataaacttcccatgatgctgtggtttccaagcatttattcaatgacgtggtaaatccactcttattctgtgtctgcactcactgtctgatgctggaattctgatgctggaattgggcttgctaaaataacagttgagtaggaacatatctcttattggtgaattatgcaagtgaatcttattgcctggattactcctaatgtctgtttctacagtgggtctgtagtccttgtcatgacaaagtcctaccacctactgtgcaaaagagagttacaattagcagtcctgagacggcatatccttacaactgcttgttcacaatgttgaacctttcgtggtgtctagacaatgtatttaggggagggccccgtaagcataactaataaagggggtggagtgtgcctaaactatttgtgtaaaaattatggtatttgcttaactcctaacttccctctgagagtttggaattgtattacatcctcagcagaggaagtgtacccaatcagccactgctaggtttgaatgtcttcccctccaaaatgcaggctgaaactgaatctccaatgtggaagtaatcaaaggtagtggtttaagaggtgagtgggtcttgagggtttggaacacatggatggattaatccactcatgtatgaatggcttaataaataaactggttatcacagatgaggttctggtgtccttatgagaagaggaagatacttcagctagacactcagccccctcatcatgtaatgccctgtaccacccagggactctacagagtccccatcagcaagaagattcccaccagatgcccactttgaccttacttgatcttcccagctttcagaactgcaaaaaataaatatcatttcttatagattaccccagttctggtatcctgttgtaagtaacaaaaaaacagtcttatagactaagacatacacaaagaaacactctaggcacagggtccctaatgtgcaactctggtagatgatatttcatatttttgttgttgttgttttttcaatgtcttacttgggggatttagcctatcctacgtgattacacagagagaatatttggaagctggtgactggttccctgtagatcaaatgtagttaagtatgacaaaagactaataaaagagattttaccaactaaatagaaaaaattgtaactttctactgggtaatgtcgaaggagaaagaaaagaagaggacagactgcaaatgttcttagacagaattcagtgtcagctttcatgaatatcaattatattccataaatctcaacagcagacatttaataatcaataacattacataaaccaatttttatagaagtcataaatgtctaaagatgcttaaaaaaaaccttctcatcaagaaagtagacagctttacaaaaacaaacagaagatttaaaactgtaatttttcacatcccatactattaacagagagaaaaagatacataaacaggaaagtgaaaaatgatagaaaagccttgtattgttttttctttggccccatctctgcccatctcattgccagtcctgaagacagcagagttcccagtgtagaactctgatcaccacagagtgtacagatcacattttgtttccacattattgcctttgtatttttgaatcagtctggggactaaccgaaggtctgaaacaaggctctcttttctatttcatctacaacagaatccaatcagagtcaaactgggcaggaactactttaaaatgttgtaaaatacacaaaaagtgtgcaaccacctaggacaacacaagatgactaagacatacattagaaggccaggtgtggtggctcacacctgtaatcccagtactttgggaggccaaggtgttgggaacaggcccccaaatctagccataaacaaaatctctgcagcactgtgacatgctcgtgatggctatgacgcacatgctgaaggttgttggtttaccggaatgagggcaaggaacacctggcccacccagggtggaaaactgcttaaggcgttcctgaaccacaaacaatagcatgggccatctgtgccttaaggacaagttcctgctgcagataactagccagagcccttccctttgtttcccgtaaggaaggcttttagttagtctataatctatagaaacaacgcttatcactggcttactgtcaataaatatgtgggtaaaactctgtttgtggctctcagctctgaaggctgtcagccccctgatttcccactccacactctaaatttctgtgtgtgtgtgtctttaattcctctagtgccgctgggttaggctctccacgactgagctggtctcggcaccaagggggtcagattgcttaaaggcaaggagttcaagaccagcctgggcaatgtggggagacctcatctctacaaaaaataaacaaaattaggtgggtatggtggcgcatgcctgtagtcccagctactcaggaaagtaggagaattgcttgagcctaggaggttgaggctgcagtgaaccacgattgtgccactgcactcaagtctgagtgaaagagtgacactatttcaaggaaaaaaaaaaaagacatatattagaccatctaagtcccaggagaaaaggctagggtataatttttctttacaaataagcatatttgaaagcacccagatatactggggaatggagaaagccccacgcaggcacaggaaacaatatatttttataaaagatgggtggggattctgtttttcagctctggctaacatccagatttaaacagaaagagaaggctacagtagtaaatactgtggctaagtgctcaaagaatgccccagcagagagccatccatgaagactggaagaggtcaggtttttgtttgtttcatcttcttttttacttttagcttctaacattcaggaaatctctgtcagaacgctggatgaacacaagctaaagtcaggaaatctctgtcagaacactgcatgatcacaagctaaagaacagagacttcagtgtttatacccagtaggaaatacagtctctgcaaactaatttggaaatgttactaaacaaatgaataggccaggtgcagtggctgaagcctgtaataccagaactttgggaggctgagggaggaggaccacttgaggccaggagtttgagaccagcctgggcaacatagtgagattctgtctctatttaaaaaaaagaaaaagaaatgaataatttcagccttcaagcaagaataccaaacaattaaggggcaaaaatctgatttccagagttacccagttataacattcaaatgtctccttttcaatacccccacccccaaaaaaaccccagagaaataaataaaacagagaaacatgaaaatacgactcattaatggaaacaatttgagataaatctgagaaacctcagacactggatttactgaataaaaacagtaaagcaactgtcttaaatatatttaacttagtaaagacaataataaacaaagaactaagagaaaaccagaaaattgatgtagggataaaataataccaaaatatgttaaaaattgagccatatagaatttctgcagctgcaagatacaacaacttaaatgaaaacatcactaaaggtattcaacagatgtgagcaaccagtggaaaaaaaaaactaaaatgaaggtaaaacaattgaaattacctggtctgagttaaaaaaaaaaagaagttcatcagaaagaaaaaaatgatatgggttagaaattcagattgtgtgtgtgtgtgtgtgtgtgtgtatacacacacatatatatgaagagtgttaggaaacaattaaatgaaggcacaaaaaattctttactcttcttatacctatctgatctaatagatataggtttattcaaaataataatatcaaattagctgggcgtggtggtgcacagctgtaatcccagctactagggaggctgaggcaggacaattgcttgaacccaggaggcagaggttgcagtgagccgagatcatgccattgcactccagcctgggaaacagagtgagattctgtctcaaaagaaaaaataataatatcaacaatgtattcagtagtttatagctcccagttgaactaatgaatgaaagtaatgttatatgtgatgggaggaagaacagtctatcacacttcggaactgtctattataccagcactattcctgaagccagtatagtactatttgaaattgaaggcccattagttgtgaatgctatactacaaactctggggaactcactaatagaatctaagaaaaagtagactatatagatatataatatagaaaataaaatcatatagaatgctcagctaaaaggaaaaagggcagaaaagagaagttaaaaaacacagagaagaacaacaaatagaaaacaataatatacatgtttatctgaatccaattatgccaactgccacttaaatgtgtattatctatattcaccagtaaaaaagaaagggactggcagagtgaaataaaaaacaaggccccaaactatatttttaaaaagtattttaaacagaaagacacagatacattaaatacacaagtatgaagaaatacatgccattctagccctgatcaaaagaaatttggaagacctatattacattcagacaaatcaggttttagattttttaaaaattacaagggatagagagatttcataatgatcaagaagtcaatcctacacgacataataatccttaacatctatgcccataaaacagagcatcaaaatacataatgcaaaaacatataaaaccacaaggcaaaatacacaaatctaggattatagttgagggaaaacaactcacctctatcaataattgacagatcagttctgcagaaaatcactaatgatatagctgaactcaacagcactatcaatcaactggatttaattgaaacatatttatagaatcattcattcaacaacagcatacatattcttctcaagcctacatgaaatattcaccaagatgaacaatattctcagccataaaacacacttgaacaaattttttaaagtatgcgatcaaatcatattagaattaatgtaaaaattagtaacagaagcatagttgaaaaacctcaacaaagtggagattgaagccacaaacttctcaactacacaaacttcaaggagaattgtcaagcaaaatgtaaatattgcaatgttgatgaaaagtgatatatcttagcaaaatctttggaatggagtaaaggcagtgctttgagggaaatttaaagaattaaatgcatttcctagaaagtaaaggtttaaaatcaacaccctaaccttccattttaggaaactagagaaaaatgacaagattaatgtaaatcaaacagaggaaagtaacgatgagaagagatattaatgaaatagcaatgaagaaatcagtagaaaacatcaacaaaccaacagatggttctttggaaacatcattaaaattcataagcccatagccaagttaactcagaaaaaagaggagccatcactactactcccatggacagtaaaatgaccataaaaaactattaggaacaactaagtgcccacatatttgataaaattacacagaatggaccaattccttgaaagacactatctaccaaaactcacaaaaagagacctaagtaatatgaataggcctgtatctactgaagatattaataaataataaatgtcccagaaaaaataagcaacaggtcagaacgatttcactgctgaattctggcaagcgtttatggaagaaatgataccaattctctacaatctcttccagaaaacagaagcagaggaaacaccttctattccattttataaggccaacattgccctaacaccaaaactagacagacattacagacatatctccaccatgtgaggacataagggttagactgccatcttcaaaccaggtagcaggcccttaccagaggcctcatctgcttgatattggactttcagcctctacacctttgagaaatgaatgtttgttgtctaaggcatgcagtgtatggcaatctggtatagcagtcctaagtgactaagagaggtagactctttctctacacacattaggctttgaagtctacaggaatcaggtcactggtctcacatataggcattaagctccctgccaagataaagaagtgataacctacaggtcacatttggcaggtttccaaatcaacccacttggagaagtcttcttttttttttttttttttgagacggagtcttgctctgtcacccaggctggagtgcaatagcacgatctcagctcactgcaacctccgcctcccaggttcaaacaattctcctgcctcagcctctcgagcagctgggattataggtgtccgctaccatgcccggctaatttttgtattttttagtagagacaggatttcgccatgttggtcaggctggtctcgaatttctgacctgaggtgatccgcccacctaggcctcccaaagtgctgggattacaggcatgagataccacgcctggcgagaagtcttctaattaaatggcttacattctgtctgtgagtaaaggatcttatcatgagtccctcaaatcttattgtgagttcttcaaactgttgatatgattaacgttatctactaacatcaaaaaagacactgatttatttctgaatcatgttttgctgattgtcttccacttagaacattttagcctgtcagctgtcatctataggcaatgattgtaacgtctatattgtacccttcaaggaaaatgacaattccggtatgaatagtcctccagcttctcctaaactttctcataaaggcatccaacttgtaatcaattttggaacacatccaaatttgttggtgtgtcttctcaagttgatcctcaaatttggcttacaataaaactttatcaaattgtatctgcctcaatggccttatttttggtaaacaaaagtatcccatgaaaggcgcaatgtaaccatccccaaccaaatccctggagacacaccagagcagagataaagtttatagccagtttcaagagacagacctaaagattaaattagaagaatatacaacacctatgaaagacaaaagcagcacacttttagaaattacagaaatttttttttctttttgagacagagtctcgcactgtctacccagacttgagtgcagtggcgtgatcttggctcactgcaagctccgcctcccgagttcatgccattctcctgcctcagcctcctgagtagctgggattacaggcatccaccaccacgcctggctaatttttttgtatttttagtagagacggggtttcaccgtattagccaggatggtcatgatcttctgacctcatgatccgccctcctcggcctcccaaagtgctgggattacaggcataagccaccacgcccagccagaaaaaatgtttttcttatttaacaagagtcttcttatataagaaaataaagtagcttccaaaggagaagtctggtaaattgaactctaattacattaagaagaagcaggcatagtgactcacatctataatcccagtactgtgggaggccaaggcaagaggaactcttgaggccaggaatttgaaaccagcccggcaacatggcagaccctctggctacacaaaattaaaaaattagccaagtgtggtggcacatgcctatagtcccagctacttgggagcccaggagtttgaggctgcagtgagctgattatgccactgcagtccagcctgggtgacagagctggacattatctaaaaaaataaaaaatttaggaagagttcatctaagtagaataaatttaaaagataaaccaccatctgaaaggaaatattaccaatccctccatgtaaaaaaggattcgtgtataaagtatgcctaaaacaaaaagagagaaacaaagcaaacatttgcatttactatgcaaatgaattaaatgactgagaattatttcacagatgaaagcccacaaaggcggtatgttcaacatgaatgctaatccagtaaaaacacaatatataatcatatggagataatacataatcacatggagataactaaaagataaatattaaaaggtatagcttcttctccaagaaaacaccaaatggctgatgacgcaggtgcagcgcgggggtccagaggccctggggaccctgggatggggaaccgcagtggcttccgcggagatttcggcagtggcatccggggccggggccgcggagctctgagaggcaaggccgaggataagaagtggatgcccgttaccaagctgggctgcctggtcaaggacatgaagatctagtccctggaggagatctatctcttctccctgcccatcaaggaatctgagatcattgacttgttcctgggggcctctctcaaggacgaggttttgattacaccagtgcagaagcagacccgtgccggccagtgcaccaggttcaaggcgtttgttgccatcggggactacaatggccatgtccgtctgggagttaagtgctccaaggaggcagccactgccatccgcggggccatcatcctggccaagctctccactgtcctcgtgcgcagaggctactgggggaacaagatcggcaagccccacaccgtcccttgcaaggtgacaggccactgcggctctgtgctggtgcgcctcatccccgcacccagggacactggcatcgtctcagcgcctgtgcccaagaagctgctcatgatggctggtatcagtgactgatacacctcagcccggggctgcactgccatcctgggcaacttcgccaaggccacctttgatgtcatctctaagacctacagctacctaacccctgacctctggaaggagactgtattcaccaagtctccctatcaggaattcactgaccacctcgttaagacccacaccagagtctctgtgcagaggacccaggctccagctgtggctacaacatagggctttcatacaagaaaaataaagtaaattaagcctgaaaaaaatgtataaacagacatgtatgcattgtttgtttgtttgttttttgagacagattttcactcttgttgcccaggctggagtgcaaagacgcgatctcggctcactgcaacctccacctcccgggtccaagcaattctcctggctcagcctcccgagtagctgggattacaggcgcccgccaccacgtccggatattttgtgcttttagtagaaatggtgtttcaccatgttggccaggctaatctcaaactcctgacctcaggtgatccacccaccaaggcttcccaaagtgctgggacaacaggcgtgagccacagcacccggcctggtcagacagttaatccacacatgctattatgatttcctagtaaactgaagtttgtctataatctataacccagcaatgttcccccatgtgttgaaaaattcatgaactgttagcatgtagagacaaaaccaaaaataacattgtcaacaacatcaaaaaattaacttaaaagtcaagtcctggccaggcgcggtggctcacgcctgtaatcctaacactttgggaggccgaggctggcggatcacgaggtcaggagatcgagaccatcctggagaacacaatgaaaccccatctctactaaaaatacaaaaaaattagccaggcgtggtggcgggcgcctgtagtcccagctactcaggaggctgaggcaggagaatggcgtgaacccgggggtcagagcttgcagtgagccgagatcacgccactgcactctagcctgggtgacagagcgagactccatctcaaaaaaaactcaaaaaaaagtcaagtcctatgagcactgcaatgtgtgagtaaactgcatgacccatagcctcagattttagcatgtgtcaaacagattgaggcaaataaagaaaacaaaaatcttttcagcacaatttttgtgtttttcccccgttcatcctttcttgatgtctctgaatcaaatcaatattctctagtgttccaatttagttactaattatatttacattttagtgatatctttttgcattatattttaacaggttgctctgatgaactagttctcatgcatgagaatcatctgaagggcttgttaaaaaacaggccattggaggccgggcgcggtggctcatgcctgtaatcccagcactttgggagaccgaggtgggtggatcacaaagtcaggagttcgagaccagcatggccaagatgatgaaaccccgtctctactaaaaatacaaaaattagccgggcgtggtggcgggtgcctgtagtcctagctgctcgggaggctgaggcagaaaattgcttgaacctgggaggcagaggtaggttgcagtgagctgagattgtgctactgcactccagcctgggtgaaagagcgagacttggtctcaaaaaaaagaaagaaagaaaacagatcattggggctggttgcagtggctcacatctgtaatcccagcactttgggaggctgaggcaggtggatctcttgaggtcaggagttcgagaccagcctggccaacatggtgaaactccatctctactaaaaatacaaaaattagccaggcgtggtggtgcacacctgtagtcccagctactcgggaggctgaggcagaggttgcagtgagccaagattgcaccactgcactccagcctgggcaatagagtaagactctgtctcaaaaataaaaaataaaaaaaaaatcattgggccccattccaagaattactaattcagtagccttgggtaataccctaaaatgtgcattccttttatatatatatatacacacacacacacacgtataatatatatatatatacacatatatgtataaattatatatatatattcatggagtaccagtgcaattttactacattgatatattgccttgtaaagtcaggcctttcagtgcatccatccctggagcaacccccattatccaccaaataacctccctcatccccatgagtcttcactgtccacatatatacacattcttctttttttttccttgagacggaatctcgctctgtcacccactgcagcctccgcctcctgggttcaagggattctcctgcctcagcctcccgagtagctgggactacaggcatgtgccaccacgcctggctaattttttgtatttttagtagagatggggtttcaccgcattagccaggatggtcttgatctcctgacctcgtgatccacctgcctcagcctcccaaagtgctgggattacaagcgtgagacaccgtgcctgtccctgtacacattctttaactaccacttataaatgagaacaggcagtatttgtctttctgtgtctgagttgtttcacttaagatcatggcctcccattccatccatattgttgcaaaagacacaatttcattatttttaatgtctgaatagtattccactgtgtgaatataccacattttcattattcaatcttctgttgatggacacttaggctaattttgtatgtttgctattgtgaatagtctgcaataaacacatgagtgcagggaactttttgatgtaatgatttccactcctttgggtagacaccctgtagtaggaatggcttttcagcattatatggatggtatgttaatggtagtattaactaactggaaactgaagaggcaaaattatgcttatgggtgaatacatactgaacctataatgagtaacaatgacaaattcagagttatggttctgacccatggtgtattttatctaacattacttctgacagcaaatatgtagcatttgctgaacacgagccaattctccaagaaaaactggtgttcaataattcaatgctgacaccacttaacatttccacagaccccacaaattgagggctcagttccacaacagggaccctactgcagatgccaaatgcaagccctagggaccacccttttaaccaaatgtgtataaaaccaacaactctactatcagatttaataatttgctacaacaagttgaagaactcagttaaacaagttgcttaaggttatcagtttgttataaagtatatgtcaagaatacctaaatggaagacatatgtcagccctccaagacattttaatttgtgcaatttcactctaattaaaccaactcactgaatacaaaaccaagcagctgataaagttcaattttacaaaagccctgtaatcctggtaataaacatgatttaagaggccaggcacagtggctcacacctataatcccagcactttgggaggctgaggtaggcaaataatgaggtcagaagtttgagaccagcctggccaacatgatgaaaccccatctctactaaaaatagaaaaattagccaggcatagttgcacacgccagtaatcccagctactcaggaggctgaggcaggagaatagcttgaacctaggaggcgaggttggagggaggcggaggttgcagtgagccaagatcacaccattgtactccagcctgggacaaagagtgagactccgtctcaaaaaaaaaaaaaaatgtatatatatatatatatatatatatatatatgaaatcacctgacccccaccaccatgcccagttctttctgttctggacaagtagcccagtgcaaagaaacatccttcactgacatcaattctggctcccgcctttttaacctgtaacaaggccctccaaattcccattctttgtcttataaataactagctgaacagttttgcctctactgattactctgaacaaaatgcttccaaaggaaacttgtggccaggcctgatggctcacgtctctaattccagcactttgggaggctgaagtgggtggatctcttgagcccaggagttcaagaccagcctgggcaacatggtgaaaccctgtctctacaaaaaatacaaaaatattagctgggcatggggttgtatacctgtagtctcagctaccctgaaggctgagatgggacaatcccctcagcctggggaggtcaaggctgcagtgagctgtgatggccccactgcactctagtctgagcaagagtgaaattgtgtctcaaaaaaacaaacaaacaaaaaaacagaaaagaaaggaaactatttaagtttctctctttcttctaggccactgatttttgacacaccctcagcctaagccaaaacacaacccctccttcatgactcatcccatgaacaggcttgagtcagggtaaaacactctgtgatctagaatctgattttcaccctccatcctgccctctccctctcatttcctttgtaatgttggttgctcttcaccttgaaaacaactttccacctaagctttaagacgctttcagatcttatacttagtgctcttctcccttatgtagcgctgttttagaataaactcattctttttttttttttttttttgagatggagtcttgttctgtcgcccaggctgaagtgcagtggcatgatctcggctcactgcaagctccgcctccccagttcacaccattctcctgcctcagcctcccgagtagcacccgccagcatgcctggctaattttttgtattttcagtagagatggggtttcaccatgttagccaggatggtcacgatctccggaccttgcaatccgcctgcctcgacctcccaaagtggtgggattaccggcgtgagccaccgtgcctggcctagaataaactcatttcttagctaaatccagatttatcttacctgaagactgtctagtgacagccctacaataacaaacacaacctcagacatggcatcaccccatctgcctctgcctgtggatccccagatttccagtgctctgtagcttctcttagtataaaaggctctttggctgggcgtggtggctcacgcctgtaatcccagcactttgggaggccaaggcgggcagatcacctgaggtcgggagttcaagaccagcctgaccaacatggagaaaccccatctctactaaaaatacaaaattagctgggcatggtggcacatgcctataatcccagctactcaggaggctgaggcaggagaatcacttgaaactgggaggcagaggttgtggtgagccaagatcatgccgttgcagttgcactccagcctgggcaacaagagtgaaactccgtcttaaacaaaaaaaaaaaaaaggctcctcccaggccaggcacagtggttcacgcctgtaatcccagcactttgggaggccaaggccggtggatcacaaggtcaggagttgagaccagcctgaccaacatggtgaaaccccatcgctactaaaaatacaaaaattagctgggcatggtggcacacgcctgtaatcccagctactgaagaggctgaggcaggagaatcgcttgaacccggaaggcagaggttgcagtgagctgagatcacagcatttcactccagcctgggcaacagagtgagactctacctcaaataaataaataaataaataaataaaaataaaaataaattttaaaaaaagctcctcccattgctggagtgattaggctgggacacctgcaggggaggctccccaggaagaaccaactaaactgggcccacaatgacctccctttgcaggctcaaaattggcctccacttggagtcactggcctcaagcctctccaccccagtcaaggccatttgcttaccctttcatgccttacgtggatttaaaacataaaacaaacaaacaaaactccatgtgtgatgaatctatcaaaatcactcaaattcagtgtttacaggagggaaggaaattgtaagtcacttctattttatagctcaacaagaaaagcacaagtatctatccatctcagataataaacatcagttactacttccataataatgaagcctttagtaaacaaaggatatttaagttctttagctattgcaaagtcccacagaatgttgcattaatctgccaagtccagataacaggaacagaccagacttatccactgtcccaagttctccagcctaaaaagaagagaaactaaagttttgataaagctttataattcaaccaaatacctaccacacattcttgtgaaaatatattcatttttctgcagccaaaatggaagagttttcccaaatttttcccttggtagtatttacactgctaagccctgaaattccatttgaaatcatccaataaaagacctgagaaacctattacatggtctctggggtaataaaagtaaataaaagttttttaaaaatgctccagcctgggcgacacggtgaaaccccatctctaccaaaaatacaaaaattagccaggtgtggtggcgcacgcctgtagtcgcagctacttgggatgctgaggtggaaggatctcttgagccctggaggcagaggttgcagtaagctgagatcgtaccacagcactcctgggtgatagagggagaccatgtctcaaaaaaaaaagaaaaaggctgcgtgcagtggctcacacctgtaatcccagaactttcattggccgaggcgggaggatcacctgaggtcaggagttcaagaccagcctggccagcaaggtgaaaccctgtctctacttaaaaatacaaaattagccaggcatggtggcatgttcctgtaatcccagctattcgggaggctgaggaaggagaattgcttgaacctgggaggcagaggttgcagtgaaccaagatagtaccattgcactccagcctgggcaatatagtgaaactccatctcagaaaaaaaaaaaaaagaaaagaaaagaaaaaaagtttttaaaaaatggaatagggcctgggtccagtggctcatgcctgtaatcccagcactttgggaggccaaggcaggaggatcacttgagcccgggacttcaagaccagcctggcaacatgaggaaaccccatcactacaaaatactcaaaaattagtagggcatggtgggcattcccagctactccggaggctgagcccaggcagtctaggctgcctaagctgcagtgagccatgatggtgccactacactccagcctgggcaacagagggagaccctgtcttataaaaaataaaaataataaaaaaaaggaatagaaaactacatatatataatttgttttctgaattccaactctttctggcctctttagaaacactttatcttctctataatctctaatgataggatgccctttacagttaataaaaaattaaattggaaataactgaacaaatcttttcagggtaactaacccagggtggggcagaactgactggaacacagacaagtctcactcaaccgtcaggtcaggtcgttctatcacctggcacatccgccagccccacggtgctcattgaagtgctcagcaaccacattcctaggagacactgccttatgtctttttcaggctcatgcaaaacctcattgggtgggtttttcagtttttagaaacagttttctagcttcacagtcggagagagtccagaaggcagaaatcatttgtcttgtcccctgaataacaccatccaattttctgataagccatgcgtcaccaaggaatggaaactaggcttggggaaaaaaatgtcaatgtcccagaggttaggtttttttttttttttttttttttttgagacagagtttccctcttgtcgcccaggctggagtgcaatggcatgattgtgatttcggctcactgcaacctccacctcccaggttcaagtgattctcctgcctcagcctcccatgtagctgggattacaggcacctgccaccatgcccggctaatttttgtattttcagtagagatggggtttcaccatgttggccagggtggtcttgaacccctgacctcaggtgatccgcccgcctcggcttcccaaagtgctgggattacaggcgtgagccaccgcgcccagcccaggggttagctttttacaggaatgatataccagaagattcctcccaccccagtgcatccacctgatcctttgggaggccccactccaacacctcaggctgtcctctgggaagagtgacccaagggccgatatccactaggccctccatgagattggcagcttccagcatcttagggtagccccagaaagttccataacacagggcctggaaaagatacagggtgggctgaggtcacatcaccctgtaaaggacatactgagaaggcatctgtgcctaggggagataaaagaggcacaaaggtttggttttttttacagcagtgtcaggtggttattctcttcttcctcacatgtgaaatgttaaggaaaacaaaataaatctgtttaaaaagagccatacattgctatctgaaaacaaacgacaaaattctgtgtctatttgaaatatcgtcttgctgacaaagggttcataacgttactgggaattgaggagtgaagttagcatatggaaggctctggaaaccaaaagatttactgttagccccaagaggagttaggatgaagggacaggtctcaaagaccctgatgccaatatctttgaaagcctcggaggagaaatggtcgcccttggaaagaaaggactgaagagcacagagaccacagctcctcccacacacaaaccccacacacgagtctggtttgtgcctagtgaccctcccaccgtcaccgtgcagcctcctcaccgggctcacaggaactgcgagccaggctggaggcgagattgcagttagatattaaccaggtgccctcagccccgctgcttcacaggaagccgcctccctgagagtcaggtcacagcagacgctgaccgccggcttccccattggcctggggataagatctctgagagttgctcaagagtcgtctaagttctttctcagatcttgaattccagcggaaaggctggcgccaagcaggctgaagaccccacaaggaagcccactcagcagcagaatgcggtttcttcacctccagtcccaagattcacccctcacttctccaccaaccagcgaccccacatcccaaccacccccgtccagacccctaaacaccccatcctcaaacctctcacggaggcggatctagggtgtcctctcctattaaaccgtttctgctgcagccctcggcgtccgggtgcagtgacttgggctgcgaacctgtactggttccgccgcacaatctggggagaagcggggctgagggcgcggagctgcccagagaggggcgccggggccggggccgcagtcgcagctcagggacgggacaggacgcccggggtcccggctgccggcccagccccaccctgcggccaaacggaccgaggaccgaggtgcgcagggggcgctcaggtcccagaccccaaagacgctgcggcgaggcccgggtcccgccacagccggttccgactggttccgaccagcccttcgccctgcctcaggacgccgggccccgcacactcaccatttcccggctgtgcggtgtcccgggtcctcccaactcccgtagtcagggtaggtcccagcgcgacaaaagccaccacagatgtcccagggcgtctctcagtgacagaatacggaacagaggtcaccagggtgaagaggccactagctcctggaacgtcacaccctcctctctgcctcgcgcctgattgacaattctcaggaacccgcccacgactttgattgggtagccctccaggtcccgcctcctgggcactgagtgacagaagaagcgatctcacagtgctgagtgcagccggatgaacaggttccagacccggcccctggcagggcgggcttcctccctgcgttgtgacccgacccgtcccgggaaacgtttgccttaaagcggaatttcctacctgtacgcagtgggccctttttgcttcttcctcctgaacaattgtgtgcaaggaatcccagactcactgtccagtggagccatcccttggcctcagagcaggagggcagccgaggccacacaggccacactgtagcagcgggggacagggggtgggtgggtgggggggtggtgctgatgtcctccagggaccaggaatttgggatgaggctgtcgcctgcaaggtcaagcctttcttccactataagcgctggatgggttctttctgcgcgctacgcaaataaagaccacggtattgcagttaaaaaaaaagtttaataaacactaggccagctacgatacgtgagagacggagttactactcaaattattctcatccaaggtcctctggtaggggtttttcaagggcagtttgggagaaagggtggaggtagctaggcttgctactgactggttggggtggggatgaaatcactggggatggaatctgtcctcttggcagtgcgtggtggctcaccgctgtaatcccaatactttgggaggcctaggtgggaggatcgcttgaggccagtagttcaagaccagcctggacatagagtgaaactccgtctctatactataagggaggagaccacccctcatattgtcttatgcccaatttctgcctccaaagaagaagtaaaaactaaaaggcagaaatgaaatccacaggcagataacccggcttgtgccctgggctgggtagttaaaaatcaacctctgacctaactgtgttatctatgattccagacattgtatggaaaagcactgtgaaaatccctgtcctgttctgttcagttctggttaccggtgcatgcagcccccagtcacgtacccactgtttgctccatcaatcacgaccctctcacgcggactcctagttgtaagcccttaaaagggacaagaattgctcactcggggagctcggtttttggagacgtgagtccgccgatgctcccagcccagctgaataaagccctttccttccacaactcggtgtctgaggggttcttgtctgcggcttgtactgctacatatttaaaaaagaaaaaaagaggccgggcccggtggctcacacctgtaatcccagaactttgggaggcccaggcgggcggatcacctgaggtcgggagtttgagaccagcctgaccaacatggagaaagctcgtctctactaaaaatacaaaattagctgggcgtggtggcacatgtctgtaatcccagctacctgggaggctaaggcgggagaatcacttgaacccgggaggtggaggttgcggtgagctgagatcgcgccaagccgagatcgtgcctttgcactccagcctgggcaacaagagcgaaactccgtctcaaaaaaaaacaaaaaaaagacaaaaaaaaaaaaaacctatcctgttatgctgaatcacttctggttggggccacaggagcagagttggcaggtgcaggtggtgtcagacatgcaaaaaaaaaacaaacaaacaaacaaaaactgaaaatacgtctacaaatgctaatctacaatagtggtgttatctgcagaaatagctggcaatctatgtctacactttagcagcattccgattcctttcatccctcagcctgatggccattcattcgttttacaaaggcagttgagttttggggaaggcttattatcatttaagctatcttccaaagttagctgtgcctaagagcccaggattaagggaaagagaagacagagggttggcaggggcggggggcggggcggggcagaacgggtgttggctcagatctcttccactgccataattttctcactgatataatttttttgcgatctattcattttcatcccagaaaataaaaacacatcaacaatgaaatgaaattgttaaatgtgtgaaaaaactggaattatagggcagcatggttgttttttttttgttttattttgttgtttttgtttttgttgttgttgtttttgagatagagtctcactctgttgcccaggcttgagtgtagtggcgcgatctcggcccactgcaacctccgactcccaggttcaagcgattctcctgcctcagcctcccgagtagctgagactacaggtgcacaccaccatgcccagctaatttttgtttttttagtagagatagtgtttcaccatgttggcctggctggtgttgaactccttacctcaggtttatttgcttgcctctgccttccaaagtgctgggattccaggcatgagccaccacacctggcctgacagcatgtattctattaaaggaatcagaagagaagaaaagaaaaaatatctcgttcagggaagtaagcaggaaaccccctttcaggaagttaaacagattcccgagcttgagagccagactcttgactcctgaaatggagccccagagtggatcagcacctgatgatgagggagagacattgaaggatttaactctgggagctcaacttgccctcctctgcacagtgtagaaacactctttccttcaagactttaaatgttaatgacttaaaagctccaatcggaagccgaaacattagggaatgaatttgaaaacatgagggtttccccatatttctatgaagcaaaagtagaaaacctaaaaccaccatgaactggaagctggaactaatggctaaaaaagaaaggagtcaaacatcaggtgtcattcgatgaaataaaatctttattcaatttgtaaaaatggtagtgtttccagacaggaaaaatgggcatgtttggaaaataaggaaaagaaatgatatctgattatagctaacaaataaatgatactcttgccttcaaaaatcacacaaagacacacacacacacacacacacacacagagagagagagagagagagagagagagaaagagagatatcctatcacctagcactttgggaggccgaggcaggcggatcacaagttcaggagttggagatcagcctggccagtatggtgaaactccgtctctactaaaaatacaaaaattagctgggcatggtggggcgcggtggctcacgcctgtaatcccagcactttgggaggccaaggcgggcagatcacgaggtcaggagattgagaccatcctggccaacacggggaaaccccatctctactaaaaatacaaaaaaattagccgggcgtggtggcgggcgcctgtagtcccagctactcgggaggctgaggcaggagaatggcgtgaacccaggaagcacagcttgcagtgagctgagatcatgccactgcactccagcctgggtgacagagcgagactccgtctcaaaaaaaaaaaaaaaaagaaatgcagaggatcaggtcttatccatgacctgcttaatgagaagctggatttgaaggtctgtagtttcctgtgaaagtttgagaagtgcatctgacagtgattagtgattcagcccaaagggtatttcatactcctcaccggtgagataattgaattcacagagtatctgaggtaggggagatccagtgggctgtgaggggctggggctggaactgaaagcaaagactggcgagacatcccgaagaagacaatgtgggccgggcgcggtggctcacacctgtaatcccagcactttggaaggctgaggtgggtggatcacaaggtcaggagttcgagaccaggctggccaacatggtgaaaccccgtctctactaaaaatacaaaaattagctgggcatggtggtgcgcacctgtagtcccagctactagggaggctgaggcaggagaatcgcttgtacctgggaggtggaggttgcactccagcctgggtgacagagcgagactccgtctcaaaaaaaaaaaaagaaaagaaaaaaaagaagacaatgtggatgaaagcgaggccactttaccaacactggtatggcctggctcgctgatcctcactatgggaacgaccactcatgataactgaccaggagtgtctgtgggccattgatcaccacactcaggccccagagcatgcgcactccaaccaatcctcgcaacttggaatgagagaaaataggcacacagagaagtgaggaaatggaggccctgtttgttgagctggggaggaatgggatatgatggaggtgaaatgtttctgctttccttgagggccaaaagacattataggccatgtgagacagagatgggccacactgttcagtttggcagggatattcagtacctgccatactgtcagtggaaagtcacaacaaataccaaaatgtcatctttcaaaggatccttgcttgcacaattttaaaaccaggccaggggtggtggctcatgcctgtaatcccagcactttgggaggctgagtcgggtggatcacctgaggtcaggagctccagaccagcctggccaacgtggtgaaacccagtctctactaaaagtacaaaaattagctgggcgtggtggcacacgcctgaagtcccagctactcaggaggctgaggcaggagagtcgcttgaacctgggaggcagaggttgcagtgagccgagatcatgccactgcacacaagcctgggtgataaagagagactctgtctcaaaaacaaaacaaaacaaaaaacccgtatgaaaactaaacctggctgggcgcggtggttcatgcctgtaatcccagcactttgggaggccgaggcggacggatcgcgaggtctggagatcgagaccatcctggctaacatgatgaaaccccgtctctactaaaaatacaaaaaattagccaggcattgtggcgggtgcctgtagtcccagctactggggaggctgaggcaggagaatggcgtgaacccgggaggtggagcttgcagtgagccaagatcatgccactgcattccagcctgggcgacacagcaacactccgtctcaaaaaagaaaaaaaaaaattctgtctggctggactcggtggctcatgcctgtaatcctagcactttgggaggtctaggtaggcggatcacctgaggttaggagtttgagaccaggctgaccaacatggagaaacctcgtctctactaaaaatacaaaattagccggtcgtggtggcacatgcctgtaatcccagctactcaggaggctgaggcaggagaatcgcttgaacctgggaggcggaggttgtggtgagccaagattgcaccattgcaccattgcacaccagcctgggcaacaagagcgaaactctgtctcaaaaaaaaaaaaaatctgtctatattttcaataagcaggtagtgtgacaggttaaggaggacagaaaaaaataaaaatggatgcggaacttacccatgatatcacagccttacgctggaagatggtggtttctttttcttctttctctttttttttttttttgagacacggtctcattcccacacctaggctggagtgcagtggtatgatcctggctcactgcggccttgacctctggagcacaggtgatcctcccacttcagcctcctgagtagctgggactataggtgcctgtcaccacacccagctactttttgtattttttgtagagccagggttttgccacgttacccaggctgtcaggctggtctcaaactcctggactcaagggatccacccacctcggcctcccaaagtgctgggattacgggcatgaaccaccacgcctagactggaagatggtttcttttttttttttttttgagatggagtctcgctctgtcacccaggctggagtgcagtggcgcgatctcagctcactgcacactccgcctcccaggttcacaccattctcctgcctcagcctcccgaataaaataaaataaaataaagtaaaataaaataaaataaaataaaataaaataaaataaaataaaataaaataaaataaaataaaatgaataaaataaaataaaatactggaggtctcagcacaaccctgagaaatccacaccctagaaacaatgtgtgaatgttaatgccacccttactacaacatggaactttttatttttcttactggaaaatggctaaaaacagtttattggaggactttatttttaaagagttggggtctcactctgtggcccaggctggagtgcagttgtgtgatcataccttaccgtaacctgaaactcctgggctcaagtgatttttcccaactcagcctcccaaacagctggaggacttttatacaggagaatatagatagaagtaaaggaaactcagtttggtttcatttatataatttaacttttcctaggttaagaaagcaataaagtctataaaccttaaatggatttccctgaatatgaaaagtgcaagaaataaattctacaaatggaaagacgtaggagtaattgaagtggtacgaagaagtctccttgagaaggtgacatttaatgtgagacctgaaatgtatattagtgtaaaaactcagggcacagccggggagggtggctcacacctgtaatcccagcactttgagatgctgagacaggaggatcactggaggccaggagtttgagaccaccctgggtaacatagcaaaacaacttctctacaaaataatgaaaaaattaggtaggcaaagcaacacaagcctgggcatgatagtcacagatcaggaggctaacgtggttagaatgtttgcacccagaaggtcaaggctgcagggagccatcatcaggccactgcactccatcctgggcaacagagccagaaacggtctcaaaacaaaaacaaaaacagtcaaccaagaagtcaatatctggcaacagtgtctttcaaaagtgaggaagaggcagggcacggtggctcacagctgtaatcccgacactttgggaggctgaggctggcggatcacctgaggtcaggagtttgaaaccagcctggccaccatggtgaaaccccatctctactaaaaatacaaaaattaggcaggcatggtggcgcacacctgtattctcagctactcagggggctaaggcaagagaatagcttgaacccgggaggcaggggtttctgtgagccgagattacgccactgtacttcagcctgggcgacaaagggagactccatttcagaaaaaaaaaaaaaaaaaaaaaaaacaggaagaaattaagaaattttcacataaacaaaaactgaagtagttttttttgttgttgtttttttaaattttgttttgttttttcaatcattagaggtgttctgcatgaaatgcaaagggtgccctggagggtgaaattgaagtacactagacagtattgggaggccttatgtgaaaataaaaatctcagtaaaaacaaatacatggacaatgataaaagctagtattattgtacaataattttgaacttcaggttttgttttctacataacttaagagcctaatgtatataaaatatatttgtctaaaagtgaatattattttaagttggacttggaactccatattttttatatagtttaagagacatggccaggcatggtagctcacgcctgtaatcccggcactttgggagaccgaggcaggtggatcacctgaggtcacgagttcgagaccagcctgaccaatatggtgaaaccctgtctgtactaaaaatacaaaaattagctgggcgtggtggcaggcgcctgtaatcccagctacttgggaggctgaggcagaagaattgcttgaacccgggaggcagaggtggcagtgagccgagattgtaccactgcactccagtctggatgacagagcaggactccatctcaaaaaaagaaaaaaggaacaaatgcattaaaaatatcctttttttgacacacaaagtagaaggatgcaaatttatgacatcaacttaaaagaggtgtgaatgaacctataatggtgtagcattttggtatgttattgaagttaaattggcatcaatttagagtgttgtaactttaggatagtaaatgtaatctccatggcaattataaacaatacagcaagagcatatacacaaaacaaaataagaaggaaatttaaatgtttcactacaaaaagcaactaaaagcaaaagaacacagtaatacaggaaatgagggacaaaaaagctataaggaatacagaaaacaaacagcagaatgccggaagatcctccttatcagaaattactttaaatgttaatgcattaaactcttcaatcaaaagataagacatctgacttttaatttgaaaacatgaggatttccccatatttttataaagtggaagtaccagatataaaagcattatgaactggaagctggaacccacggctaagaagaaaggagccaaacatcagatgtcattagatgaaacaaaatctttagtcaacttgtaaaaactgtaatgttttctgccgcgacatgtgggcatgttaggaaaataagaaaaaaaaatgatgtctgagtataactaatgaataaatgatactatttccttagggaactacacacagacacagacacagacacacacacacacacacacacacacacacacacacacacacacaaacacacacagtctaagatcacaggacattgttccttccctgaaaaataaactactgctctgtaagatgctccactcctcactcctcacattaactgctcctggaataatgtcatattttgttgtttgcagataggcattaaaagagggtgtagcgggctgggcgcggtggctcatgcctgtaatccaagcactttgggaggccgaggagggcggatcacgaggtcaggagatcaagaccatcctggctaacatggtgaaactctgtctctctaaaaatacaaaaaattagccgggcatggtggtgggcgcctgtagtcccagctactcgggaggctgaggcaggagaatggcatgaacccaggaagcggagcttgcagtgagccgagatggcgccactgcactccagcctgggcaacagagcgagactccatctcaaaaaaaaaaaaaaggcgggtgtagggccaggcgcagtggctcacccctgtaatcccagcactttgggaggccaaggtgggtggatcacgagatcaagagatcgagacatggtgaaaccccatctctactaaaaatacaaaaattacctgggcatggtggcgcatgcctgtagtcccagctactagggaggctaaggcaggagaattgcttgaacccgggaggcagaggctgcagtgagccgagattgcaccattgcactccagcctggcgacagagtgagactccatctcaggccgggtgtggtggctcatgcctataatcccagcactttgggaggccaaggcaggcggatcacgaggtcaggagttcaagaccagcctggccaacatggagaaaccccatctctactaaaaatacaaaaatttgccgggcatagtggtgcatacctgtaatcccagctactcgggaggctgaggcaggagaatcgcttgaacccaggaggcggaggttgcagtgagccgagatcgcgccatggcactcaagcctgagcaacagagcaagactccatctcaaaaagaaaaaaagaaaaaaagaaaaagaagggggtgtagtgtgtcgaactaagtgggtgtcaggggttcacttacagactttgtatgtttttacaaactgcagcaattaagtcgtcaattaccgtgttgatttaaatacatataaaaactttcagacaaaaatagacgttcacattaccatgatgaaaaaagtcagtaatggtgattcctctgtgaaactagaaaagaaatccagtggttaaacttggcagctccaagggtatcactgccccctaggacagtggtccccaacctttttggtagcagggagcagtttcatggaagacaacttttccacagactgcgggggaggggtgcggttttgggaggattcagctgcattaaatctattgtgcactttatttctattattattacattgtaatatatgatgaaataattatacaactcaccataatgtagaatcagtgagagccctgagcttgttttcctacaactagatggtctcatctggaggtgacgggagacactgacagatcatcaggcattagattctcataaggggcgtgcaacctaaatccctcacatgcacagttcacaacagggttcgtgctcctatgagaatctaatgctactgctgatgtgacaggaggcagagttccggcagtaacgtgagtggcccagttcctaacaggccatggacctattactgatccgttgcccaggggttagggacccctgccctaggcaacatcttgaagatctatttgaaatacacttcttgacttttcttttttctttttgagacagagtcttgctgtgctgcccaggctggagtgtagtggtgcgatctcagctcattgcaccctctgcctcctgggttcaagagattctcccacctcagcctcttgagtagctgggattacaggcatgcgccaccacactggctaattttttgtatttttagaagagatgaggttttgccacgttggccaggctggtctcaaactcctggcctcaagcgatctgcccgcctcagcctcccaaagtgctgggactacaggtatgaggcaccgtgcccagcctgaaatacatttcaatacaagttattcccctgaataaagaatcagctcttatcaaagcctaaagtgatcaaatgcttgccaaaagctgccgttgatccgggtttttttctgtttttttttttttttttttttttttgagagaagtctcactcttatcccccaggtttgagtgcaatggctcgatcttggctcactgcaacctctgcctcctgggttcaaatgattctcctgcctctgcctcccaagtaactgggattaagtcgcctgccaccacacctggctaatttttgtatattttagtagagatggggtttcaccatgttggccaggctggttttgaactcctgaccacaagtgatctgcccgcctcggcctcacaaaatgctgggattacaggcatgagccactgcgcccgtcaatccagttttgtttcattcaaactctctgtggcctgtgacataggtgaccactctcccatcttgaaataccttctcctggaggattccaggaagggacacccaattcattctcctcctaagtcactggcctgcccagtctcttgcaggctgctcctcctgctaacctcagaggtggacagccattggtctcctcctgagcacttgtcttctgctacactttgccccttaccctgaaacaaggtggcttctgctggacccagggcatcaaatagcatccatatgataatgttttccaaatttcatttagatctttctctcaggctccagatccaataccctggtcaacacttcgcttgtttgactcaaacatgccatgagtgattacaaaacataacccttcatttcccctccaatcatctcccctggccttggtcctctgagtgaggggaagcacccaggggctctgaaaataggattcatccttgcctctcttctctccttcactccatcagaaatcctacgggagctgcccctgcctgtgtaactcctagtcaaccttcaggaatttttttttgttttttttgagacgagtcttgctctgtcgcccaggctggagtccagtggcgtgatctcggctcactgcaacctctgcctcccagattcaagcaattctcctgcctcagcctcccatgtagctgggattacaagcatgtgccaccatacctggctaatttttgtgttttttagtagaggcagagtttcaccatgttggccaggttggtctagtctggaattcctgacctcaagtgatcagcccacctcagcctccaaaagtgttggaattacaggcgtaagccactgcgcctggccaccttcaggctttgagaattagtctcactggggaagcctcccttagtctctcagactagtgtgagaaccctctccaccatcatattttagagccacacactcttctctactgcgctgaagacgatcaccactgatcctttgtttatgtccagaactgctaaacagtgggattgatggggcctttccccaccctggaacccggctccaaaaacacagcttgggttcataactagacttctcaatacacaaccttctgtcgatatccactaatattacccaaacccacgccagcacagcctctcttcaaactacaactatggcttttaagctggtctcccaggtcccctctaccatctattctctgcccaccagcaggagtaagcttcttcaaacacaaaccaaacatcacttctctgctcaaaatcccataaacggccgggcgcgatggctcacgcctataatcccagcactttaggaggccaaggttggtggatcacaaggtcaggagtttgagaccagcctggccaatatggtaaaaccccgtctctaccaaaaatacaaaaattagctgggcatggtggcaggcacctgtagtcccagctactcgggaaactaaagcaggagaatcacttgaacccgggaggcagaggttgcagtgagccgagatcgtgccattgtactccagcctggacgacagagcaagactctgtctcaaaaaaaaaaaaaaactataaaagtgtaacctatctttaaaagcgtaacttatcctataaaagtgtaactttactgcctatctaaccacgtcttttattacctgagcactctatgttccatggaccaacacgatgacacgtgggagcgagttagaaacgtggactctcacactctgtccctaatctgctgagccagaagctgaatttgaggatctatagttccccgtgaaatttcagaagtgcgtcttacaagtttcccccttaacctgacccagccataagggtattgcatattcctcaccactagggtatttgaattaacagaacatctcaggtgggggcagcaaggggctggggctggggctggaactgggagaggagacaagtgagacatccttaagaagatgatgtggcgagggcgaggccgccttcccagcactgctatgtcctggcccactgctcttgaagtgcaggaatggccactcacgggaactgatcaggaggatgcatgtgtgctcagcaatgtgctgaggctgtagcgcttgcacatggccacccatgtgctcagtctgggagtttggtattcagggaagcgtgtgcaccagcaggcagcaaaagtatgtgggtcctccttgccagccagcccatactgctcggggatgggctgaaagtgatggagaagaagggttttctttgctccaagaggccagtggtaaagtcacaacaaacaccaaaatgtcatgtttcataagctctttagctatacagcaattttaaaaccatctaagaattaaacatatttctgggcacagtggctcacacttgcaatcccagcactttcagaggcttaggttggaggatcgcttgaggccaggagctagaggccagcttgggcaacaaagtgaggcccccatctctaaaaaaaaaaaaaaaaaaaaatatatatatatatatatatatatacacacacacacatatatatacacatatatatgtatgtgtatatatatatgtatatatatatgtatgtgtgtgtatatatatatacacgtatatatatattagcaaggcgtggcagggtgtgcctctagttccagttacttgggaggctgaggcaagaggatgccctgagcccaggttcgaggttacagtgagctatgatcatgccactgtactctatcctggtgagacaaaatgagaccctatctctaaacagaaaaataaaagaagaggcaattaaacctaagtgtctattagaaatacacttcaatgctgggcacggtggctcacgcctgtaatcccaacagtttgggaggccgaagcgggtggatcacccgaggtcacgagtttaagaccagcctggccaacatggtgaaatcttgtctctactaaaaatacaaaaatgagctgggcatggtggcgggcacctgtaatcccagctactcaggaggctgaggcaggagaatcgcttgaacccgggaggcagaggtttcagtgagccgagatcacgccactgccctccagcctgggcaacagagtgagactctgtctcaaaaaaaaaagaaaagaaaaagaaagaaatatacttcaagcaactcaagaatcccagagaatacaaaatggaaagaaattttattaactgcttctattaagaaaacactattcgacttatgaacctttatgtgaagaaaacttgcaaaaatatctcacatcaatttttgtatgaaagtaagaagtaggattcatagtgtagattcatgttaagaatgaggcactggtaaagagaaagagaatagagttatacgttttcatttctttcctattgcaaattctctggagcattatacatgtcttaattttaatcagattttcctaaattacttacatttatagcatttctagacagcaggggttgggatgaagaaacttcaatccagcaaagtttgtatatatacattcatggaggtgacatttaagtcatttcattaggaaactctttattttttattttttatttttttgagacggagtgttgctctgtcacccaggctagagtgcagtggcactatctcggctcaccacaatctccgcctcccgagttcaagcaattctcctgcctcagtctcccgagtaacctcctgagtacaggcacccgctactccgcccggctaatttttgtatttttagtagagacggggtttcaccatgttggccaggctggtctcgaactcctgacctcgtgatctacccacctcggcctcccaaagtgctgagattacaggcgttagccactgtgcctggcccattaggaaactcttaaagttgtctgcagatagatactgcacatggaattagtcctagtccttggaaagttatatgattttaattcaatagtgtatattactgtgaataccgtatatgtttcatctctaagcaggaaattgaatccattaacagtgttaatagttttgggttttttttttttttttagacagggtctcactctgtcactcaggctagagtgcagtggtgcaatcttggctcactgcagcatcgacttcccaggctcaagcaatccttccatctcagcctcctgagtagctgggactacaggaacacaccaccagacctgggtaattttttgtattttttgtagagatgaggtttcgccatgttgcccaggctggtctcgaactcctgggctcaagcgatccatccacctcagcctcccaaagtgctgggatgacaggcatgagccaccacacctggccaacagtgttaatagttttccagttgttttgtctttagtttcccaagcaatgaatgctattatggtcaaacatcatacttgcttcttccatccctttcaacatattgatcattgctttttttttgatattaagtaatagaggttattgtaataagtgattggagtgaaacagacatatttgcttttgctaggttctgttcctcctttcactgggaagcccctcacccagtccctcatcatgctctgctccaaaacacaccttaaccagaatccaacaatgttcatgttcaaaatgaaagacaaaacaaatattttcctaggcttaaaaatatgaacattgagagaatttttcctggcacaccagccctacaagaccaaagttgccaggtgcggtggctcgcgtctgtaatctcagcactttgggaggccgaggctggtggatcactagaggtcaggagtttgagagcagcctggcaaacatggcaaaaccctgtctctacaaaaaaaaaaaaaaatacaaaaattagctgggtgtggtggcacacgcctgtagtcccagctacttggggggctgaggcaggacaatcatttgaacccggcaggtggaggttgcagtggccaagatagagccactgcactccagcctgggacaatagaggaagactccatctcaaaaaaaaaaaaattattgagtctgtcaaaatccacaggaaaaagcagagagcaccatgcaagactatataagtggaaaagacaaactgaatatgtgtttcttcacctttctccttgttatggatttacaagtcaattgtgtaaagtaataagtagtaatggattgttaggcctacaacatagaaaaatttaacatacatgtattatatttataaataacaccataaaaactgaactaaatgactaccagtggaaaagtaataattataagaatatattgttgaatgtggaacactgagttgttacatatgcaacaaagtaccccagaaaggcaaaaacataatagagctatagaggacaaatatgtgtgtacatcactgaaatttaaccacatattactggagaactgagcctgattttgataaactaacatttacatgacaaacactagagtaatcactacaaaatcttagaacaaatgtaatgaaaaataaatcatcctacattggaaagatatactgggtgaaggcagaatttactgtgcttccttaattaaaaattgacttgggccaggcgcagtggctcacgcctgtaatcccagcactttgggaggccaaggtgggcggatcatctgaggtcaggagtttgagaccagcttagccgacatggtgaaaccccgtttctactaaaaaaaatacaaaaattagctgggcatggtggcatgcgcctgtaatcccagctactcaggaggctgaggcaggagaaatgcttgaacccgggaggcagaggttgcagtgagtcgagatcacgccactgcactccagcctgagcaacaagagttaaactccgtttcaaaaacaaacaaacaaaaaattgactctacattcattccttctaacctctaacacaggtaaaacctctaacacaggtaaaacctctaacacaggtacattcattccataacatatggggagaagatttccctcattcatctaacgtggaaatttccatgttatatatttccacttcaaccttgactctactactaaaatcaggaaattcttgtgcatgtcatgatctctttctatccatttcttcaacctctaacacaggtacagaattacaggttaatcatctctttttctgcattgcattttctcaattttctattattagggagatcttttccactttattatttttagtttgtgctacttaactttctcatattttggaagattagtcaggaacaaaacttttaagtggctcaattatgtgtttgttttgttttgtttgtttgtttttgaaacagggtctcattctctcacccaggctagagtgcagtgaaacaatctcagctcactgcagcctccacctcctgggctcaaacgattctcatgccttagcctcctgagcagctgggaccacaggcatgcgccaccacgccctgctttttcttttttttttctttgagacggagtctcactctgtcgcccaggctggagtgcagtggcacgatctcggctcactgcaagctctgcctcccgggttcacgccattctcgtctcagcctcctgagtagctgggactacaggcgcccaccaccatgcccggctaattttttgtattttttttagtggagatggggtttcaccgtgttggccaggatggtctcgatctcctgacctcgtgatctgcccgcctcggcctcccaaagtgctgggattacaggcgtgagacaccacacccggccttttttttttttttttttttttgagatagagtctcgctctgtcacccagactggagtgcagtggcgcgatctcagctcactgcaagttctgcctcccgggttcaagggattctcctgcctcagcctcctgagtagctgggattataggcacctgccaccacacctggctaatttttggatttttactagacagggtttcgccatgttggccaggctggtctcgaactcctgacctcgtgatctgcccgcctcagcctcccaaagtgctgggattacaggcgagagccactgcgcccaggcttttgttgttgttgttgttttggtagagacaggctttcaccatgttgcccacgctggtcttgaactcatgaactcaagcgatccacccggcttggcctcccaaagtgttgggattacaggcgtgggccaccgccttgcctggcctcaattatgtttatgaatgttgtgaagtagaaattaatattaccccttcaaataaacaggaaggtgttagcataccacacgggtccaaagtgagtatggttcagattgggaacaaagctgtgtggcagtagctgacctaagcctgggatcaaatctaaaggttgcctgagagaaacagggactgcgtaggaacaggtcttccatgaacacaggaaaatgaacaaacttagtgctgcagacaaggaggaatgtggcccagcgctgcttggtaagttcatggtccaagggagtctttgcacttctgtggcttttttttttttttttttgagacggagtctcacccctgtcgcccaggctggagtgcagtggcaggatcttggctcactgcaagctctgcctcctgggttcacgccattctcctgcctcagcctctctagtagctgggactacatgcacctgccaccacgcccggctaattttttgtattcttttagtagagacgggtttcaccatgttagccaggatggtctcgatctcctgacctcgtgatccgcatgcctcggcctcccgaagtgctgggattacaggcgtgagccaccgcacccggcccacttctgtggcttcccccccccgccattttctcatggtgccaaaattcacataagatagaatttaccttggctgggcacggtgactcacacctgtaatcccagcactttgggaggccaaggcgggaggatcacggggttcgagaccaacctgaccaatatggagaaaccctgtctctactaaaaatacaaaattagctgggtgtggtggcacatgcctgtaatcccagctactcaggaggctgaggaagaagaaatcacttgaacctgggaggcagagattgtggtgagccaagatagcgccattgcactccagcctgggcaacaagagcaaaactccatctcaaaaaaaaaaaaaaagatctacaggaaggagtttcaggccagcaaggtctggcttagctagctacacaatgcattagagcttcaagaacttgaagaacatgggagaattggccttggctgatgcaaaggaaacatcagcattcctagaaaagctcatgaaactcattaaaaaaaaaaaaaaaaaagaggctaacttccagagcaaatcctccattgtaatgaatcaggcatgttctggaagaggatgcccaattgtaccttcatcacaagagtacaaagaaagccttggggttcatgacttggaaagattgccttactctggtgctacgtggcaatgcagcaggtcataagatcaaacaaagcctcctctactaagtaaacaatccgtgggtccttgaaaacaaaagcgaaacttgcctgcccgtgtcctgacaaaaacacacgaggacttggttctaccactgcttcattcctgatgtgaatgaataccttgaaaagaaggggctgccactcaaggccctcctcataactgacaacgctcctggcatctctcttctctctgttatgccgataaaaatggggaagtgatgttcctgcctcctaaaactacatcactgctacaactacttgatcaaagcatcatcaagtgcctcaaggtgtcttacacccactggacttttggaaggatttatgctgtcttgataataaccctcaccatgtcatacaggatttatggaagagcttcccaactgcagaaacgattgtgtttattgcggaggctgtaaatgccctacagctcaagacagccaaagtgtgttggaagccattatggagtgaggaagtcaatgatttcaggcgcttctgcactatcgatatgatagtcagaaatatcttaaatgtaaggaaagttggtggggaaggctatctctgacacaagtgaagacaatgttgaggaacacacagaagagcaaagaagaaacctttactaacaaggaactagaagatatgctgaaatcctctatagatgatgatgatgatgatgtagatttagaagaggcagtgccgccaggcgtggtggctcacgcctgtaatcccaacagtttgggaggccgaagcgggtgaatcacctgaggtcacgagtttaagaccagcctggccaacatggtgaaaccccgtctctactaaaaatacaaaaattagctgggtgtggtggcgggcacctgtaatcccagctacttgggaggctgaggcatgagaatcgcttgaacccaggaggcagtgtttgcagtgagccgagatcgtgccactgcactccagcctgggtgacagagtgagactcagtctcaataaataaataaagaggcagtgccataagtggtggctcatgcctgtaatcccagcattctgagaggccaaggcaggcagatcacttgaagtcacagggagttcaaaaccagcttggcaaacatggcgaaaccctgtctctactaaaaatacaaaaattagctgggcatggtggtgcatgcctgtattcccagctacttgggtggctgaggcaggaggatcacttgaacttgggaggtggaggttgcagtgagctgagattgtaatcccagctcctcaggtggctgatgcaggaggatcacttgaacctgggaggtggaggctgcagtgagctgagattgcaccactgcacttcagcctcagcgacagagtgagactctgtctgaaaaaaaaaaaaagaagcagtgctatagattttgatacttgaaaaatctgaaggctgggtgtggtggctcaccctgtaatcctagtaatttgggaggccaaggcaggcagatctcttgattccaggagttcaagaccagcctgggaaacatggtgaaaccttgtctccacaaaaaacacaaaaagtagccaggcatcgtgatgtgtgcctataatcccagctacttgggaggctgaggtgggaagatcacttgagcccaggaagttgaggctgcagtgagccatgcactgtagggtgacagagtgagatcttgtcttaaaaaaaaaaaaaaagaaaagaaaaagaaaaaaaaagaaaaattggaagcagttttagggcacctacagcttctacaaggcgcaagtgttaaagattatcatcctcaattaagattcttccatggaacaaagcctccatgtcaccccagagattacatgctcacaaacgttgcaaagtttaaaaaaaaaaaaactagcttcctacaatgtttctaattaaatatctgcaaatatgaagacagccttcaatgcttaaagatcttcagtcctcaaattgaacagattctgacattagtattatttagactgctccaaaaattcagtatctgcagtcagaatctgtttcttccaatatagttgatcatgttgacatcctgtcaagattcgagttagcctgaggtctcactgcttatctgtggtgtcacacatctagctgactcaacacatcacaacattaggcacgatattgcaataatcatcattacacttttgttgggtgaatgttaacacattttcaggtcattaaacaaaagcaatctatgagtgttgaaagaaaagatttataatgctctaggtgacatgtattatgtgggtgggtctgtactgaatatgtgtagggtctttctcatatcatgattcactaaacaatataataacaactatttacatagcttctatgatgcatgatgtattttaactaatctacagatgatttagagtatacaggaggatgtgggtaggttacatgcaaatattttttattgttattatttttttgagacagggtctcattctgttgcccatgctagaatgcagtgatgtgattttgactcaccgcaacctcaacctcccaggctcaagcgatcctcccacctcagcttccctagtagctgggactacaggtacatgtcaccacacctggctaatttgtgtatcttctgtagagacagggttttgccacattacccaggctggcctctaactcctgggctcaagtgatccacctgtcttgggctcctaaggtgctaggattacagaggtgagcaactgtgtctaacccaaatatgtcttttctttctttcctttttttttttttttgtgtgtgtgacagaggttgttttgctcttgctgcccaggctggagtgcagtggcgcgatcttggctcaccgcaacctccgcctcccggattcaagtgattatcctgcctcagcctcctgagtagctgggattacaggcatgtgccatcacatccgggtaattttgtaccaaatatgtcatttttaaaaaaggacttggcatgtgtcgatttatgtatgcccagggggtggtagaaccacgctcctgcaaatattaggggataactgtatttgaaagaaactgaggcttaaaattaaggctttactatgtgtttacattcatagggtttatctccaatgagaattatttctatctgaaatgaaataacattaaagaatacttccctacatttcacacatttatagagtatctctccagtgagtccttttatgtctatgcaaggacctgagagaactcaatgcttttctacatttcttacattcatatgacttctctccagagtgaatcctttcatgtactttttttttttttttgagacagggtctggctctgtcgcccaggctggggtgcagtgcatcttggctcactgcaacccccaccccttgggctcaagagatcttcccacctcagcctcccaagtagctgggactacaggggcataccaccacacctgctactttttctattttttgtagagacatggtttcaccattttgcccaggcaggcctcaaattcctgaggtcaagcaatttgcccaccctaagtgctgggattacaggcgtgagccactgtgcccagcctcatgtacttttaagttaccaaaatgactgaaggcttccctacatattttacactcacagagtttttctgctctgtgagttgttttatgttgacaatggtgttaaaaaaaaatcgatcactttcccacattccttatatcatacagcatctctccagtgtgagatatttcatgattttgaaaggaataaaaattatgaaaggctttcccacatttacatttatagggtttctgtccagtgtaagtttattcatgatatcaaagggaactggaaatatagaaggctttataatagtttacattcatattgtttctctccagtgagtcttttcatgtctttgacatacactgggataaacaaaggctttcccacataccttgcatttattcggcccatctcccgtatgcattaccatatgtcttcgaaagcttgagctatgagataacgctttcccacactgcttgcattcatagggtttctctccactgtgagacttttcgtgtctttgacatacactaggataaacaaaagctttcccacatatcttgcatttatgaggtccacctccagtgtgcattatcatgtgtcttcgaaagcttgagctatgagataacgttttcccacactgcttgcattcatagggtttctctccagtgtgaattcgttcatgatatcgaactaaactgggacgatcaaagcctttcccacatatcttacatttatgaggtcgatctccagtgtgccttttcatgtgtatctgaaagcttccaagatgatgaaatgttttcccgcattgcttacactcatagggtttctctgcactgtgagtggtttcatgtcttcgaagggaactggaaacactgaaggctttcccacactgtttacatgtatatggtttctctccagtgtgagttctttcatgtcttatataggaactggaatcaggcaaggctttagaacactgcttacattcatacggtttctccccagtgtgcattctctcatgtcttcgataggaactgtaaaaaggaaaggctttagaacactgcttacattcatacggtttctctccagtgtgagttctttcatgcatacgtaataaactgggccaaaaaaaagctttcccacacaacttacatttataaggtctatttccaccttgcactaccatgtgtcttcgaaggtttctacgagaactgaaggtttttccacattccttacactcatagcgtttctttccagtgtgaggccttccacgcgactgaaaggagtgatggtaactgaaggctttcccacgttgtttatgtgtatgtggcttctctccatattcctgatactcatgtggtttgtgtccagaatcaactctgatgtggctattaagggataaatgacccattatgacttcttcacactcagcgctttgacatggatcttctccaggacaaatgctgttgttcacaatactatctcgaatgaggctaaatgtttctccacactgactactgtctttactttcactgaatctctctaccatatgacatctgtaaaaaatgagtagtacgttactaaatagttgtttctaaatgattatttatttatgtgtattaataggtattggatgtacttttttttttttttccctgagatggagtcttgctctgtcacccaggctagagtgcagcggcacgatctcggctcactgcaatctcttcctcccgggttcaagcgattctcctgcctcagcctcccaagtagccgggattagagaggcatacgccaccacgcccagctaattttgtatttctagtagagacagggttttgccatgctggccaggctgttctcgaacttctgacctcgtgatccacccccccttggcctcccaaagtgctgggattacagaagtgagtcactgcgcctggccagatatacctttttatcattaccatgcaaagtgtaggcttcatgccctgtttgaacatgaatgaactgaatgctatgcaagacaacccaacaccagctgggttttttttttttccttttctttttaattaattaatttattttttgaaacagtatcttgctttgtcaccaggctggagtgcagtagcagaacgatggttcatgcaaccttgacctcctgaactcaagtgatctacctacttcagcctcatgagtagctggaaccataggtgtgcaccaacacacttggctaattttttttttgagacggagtcttgctctgtcgccaggctggagtgcagtggcgcaatctcggctcactgcaaccttcgcctcctgggttcatgcaattctcctgccttggcctcccaagcagctggggttacaggtgcatacccccatgcccagctaacttttgtacttttgtagagacagggtttcactatgttggccaggctggtctcaaactcctgacctcaagtaatctgcctgcctcaacctcccaaagtgctgggattacaggcatgagccaccatgtccagcctcatatgtaaattcttataaaatgttttaggaggaaattttttaagaataaataaatttaggctggtgcagtgactcacacctgtaatcccagcatttggggaggccaaggcaggcagattgcttgagcccaggaattcaagaccagcctgggaaacatgccaaaaccctgtctctacaaaaaatacaaaaattaacgaggtgtggtggcttgcacgtgtagtcctggctactcaggaggctctggtgggagggtcacatgaacctgggaggtcgagtcttcagtgagccaagatcatgccactgcactccagcctgggcaacagagcaaggccctgactaaaaaaaaaagttaatttaaaaaattaaaaaataaatttaagctggacttgttcattttctttgtttttaaaatttccttttactctgagaatcacttcagaaacataactttctcctgtgagtgcaaattaccttagatttctcctaggatttttgtactgatcttcagtattctgttcttcccatatcattcctaaaagggagacccagaaaatcactatacattattagaaaattatataaaacagtaagattttatgtatactgcaatcatacatgattcgttcatcaaactacagttaattctgtacagtttgggggtggaggcagagtctcactctgttgcccaggctggagtgcagtggcacgatctcggctcacagcaacctccgcctcctgggttcaagcgattctcctgcctcagccttccgagtagctgggactacagatgcgtgccaccacaaccagctaatgtttgtatttttattggagacggggtttcaccatgttggtcaggctggtctcaaactcctgacctcaagtgatcttcccacctcagcctcccaaaatgctgggattacaggcatgagccaccatacccggccttacagttgattcttgaacaacacatgtttgaactgcacagctccacctacatatgaattttcttcagtctctgctacccctaagacaccaagatcaatccctcctcttacttagccttctcaatgtaaagataaggataaagaccttttaatcatacacttaatgaatagtaaatatagtttctcttctttatgattttcctatcaatattttctttctctagttcactttattgtgagaatatagtatgtaatacatgacttacaatatgtggattaatatggattaatcaacttttttttattattttattttattttatttttttgagacagattctcgctctgtcacccaggttggagtgcagtggcgtgatcttggctcactgcgacctctgcctcctgggctcaagtgattctgctaccttagcctcctgagtacctaggattacaggcatgcgccaccacgcctggctaatttttgtatttttagtagagatggggtttcaccacgttggtcaggctggtctcgaactcctgacctcatgatccgcccaccttggcctcccaacatgctgggattacaggtgtgagccaccgtgcccagccagtcaactgtttatgttaccagtaaggctgctggtcaatggcggcttaagctatggtggacaaaaagttagatgaggatgtacaacttctttcagggctgtcacctctgaattctgtgttgttcaagagtccatcatatgccctttccatatttcaaatcattgaacagcactgatgaccatgaaacaaatgtctgtaattgattaagtgaagacatggtatcatccttacttatacagtccaggttcctgatggtttcttgcatcacatatctgtataaattcttctgtgatggacccagcaaagcccattcctcctgggtgaagttcacagccacatcctcaaaggccactgcgtcctgaaacatcccacatagatagaggagaaaggttgagtgacagtactgaaaaaactatactcagttcataaacttcatatgatgctgtgctttccaagcatttattcaatgatgtagtaaactctctcatattctctttacactcactttctctcacacagccattttgatggtagaattcaacatgtttggtaaagttacagttgaataggaacaggtctcttcttggtgagttaaatgagtcttattgcctgcatcaccctaatgtctatttctgtagtaggttgtagttcttgtcaaagtcctactgacaaagtcctactacctattgtgcagaagagagctaccattagcagtcctgagactgcatgtccttacaaattcttattctcaaagttggaccttttatggtgtctaggaactggatttagggagtgccccaccaatgtaactaataacagagctcgattgtatctaaactgtttgtgcaaaaagtacattattttcttaactcctatgttctgagagtttagaatcttacaaactcagcagagggagtgtatgtgatcagccactgctgagtttgaatggttgtcccctccaaaacacatgttgaaagttaatccgcaaagtgggagtaataaaaggtggggattgaaaaggtgattgagtcttgaaggttcagagctcatgaatagattaatgtatacatggatcaatggcttaatgaataaataagttatctcaggaaggggactggtgtccttataagatggaagagacccgagttaggcactccggcccttgccatgtaatgctttatgccatctaagaactctgcagagtccccaccagcaagaaggttctcaccagatgcccagccttaaccttggacttcccagcctccagaacagtaaaaaacaaatattgttccttataaattatccaggttcagattattcttaagcaacaaaaaacagactaagccagccaccaaaaaacactataggcactgggtctctaatgagagaccctggtagataaaatttcacatgtttttttgcaactgattagttggaggattcggcacatcctctgggattatactaacagaaaatctggaagctggtaactggtttcctctagaccaaatgtagttaagcatgacaaataaataataaaagatatttcaccatcccaatggaaaatttttgaacatcttattgggtaatgtcaaaggagaaggaaagaaggtcaatgagagaatgtaatattagaaaagaactcaatgttatctcttatgaatatttataaaattccctaaataactaaaacagacctaaataaccaaaaatttcactaccagctaggtaccatggctcatgcctgtaatctcagtactttgagaggccagggcagatggaccatttgagcccaggagtttgagaccagcctgggcaacatggcgaaaccctgtctctgcaaaaaaatacaaaaaaattagccgggcatggtggtgtgcctgtagtcccagctaattgggaagctgaggtgggaggatcacctgagcccaggatgtgaagactgtaatgaaccattattgagccactgcattctagcatgggtgatacagtgagactctgtctcaaaaaaataaataaaattacattatcaaatctaatagaagtcacaaatgtctaaaaatgctaaaaaacctcctcactggccgggtgcggtggctcacacctgtaatcccagcactttgggtggctgaggtgggcggatcacctgaagtcgggagttcaagaccagcctgaccaacatgaagaaaacctgtctttactaaaaatacaaaattagccaggcgtgatggcgcatgcctgtagtcccagctactcaagaggctgaggcaggagaattgcttgaacccaggaggcagaggttgcggtgagccgagattgcgctatcgcacttcagcctggttgacaagagcgaaactccgtctcaagaaaaaaaaaaaaaaaaaaaaaaaaccctctcaccaacaaagtgacagctttgcaaaaacagataaaggattttgaaactataatattcagcaccccataccattaataaagagataaacaaatagataaataaaagtgaaaaaatggtagaaaacccttatggagtttttatttgtccttggcccaatcacaccccacctctgcgccagtcttgaagacagcagcctgagatcccagtgaggaactctggtcactaattctagagaaagcagatcagatgttattcacaaattattgcctttgtattttccagtcattatggggatgatcagaaggtgtgaaataaggctgtcttttctatttcatctacaatggaatccagttagggtcaaacataagaaatgctgaaaaatggtgcaaaatacacaaatagcctgcaactacttgagacagcagactgtaattaagacatacattaaggccaggcacggtggctcatgcctgtaatcccagcactttgggaggccaaggcgggcagatcatgaggttaggagtttgagaccagtctggccaacatagtgaaaccccgtctctactaaaaatataaaaattagccacgcttggtggcgcatgcctgtaaccgagtagctgcagcaggagaatcgcttgaacctggcaggcagaggttgtggtgagtcgagattgtgccactgcactccagcctgggcaatagagcaagactccatctcaaaaaaaaaaaaaaaaaagacatacattagcccacctaagtctaaaaggaaaaaactggagagaaaatttccttcaggaattagggtattcaaaagcacccattatattgtggaactgagagagccacatgcactcataggaaagaacatattttcatagaagatgtgaggagacccttattttcagctctggcatgtttctaggtttagtaaaacagaaagtaaatgctacagcagagttttaaacagccttgctaagtgttcaaggaattgctccacaagagccatccacaaagactggaagaggtcaggtttttgtatgtttcatcttccttcttacttttagcttgtagcattcaggaaatctctatcagaacacaaatgaacacaagctaaagaacagagacttcagtgtgtacatcagatagggaatagagtctctgcaaacacactttgaaaatgttactaaacaaatgaatagttacagccttcatcaaacaagaacagcaaacaatgaaggggacagaatctgatttccagatgcaaatgtctacttttcaatgcacacaaaattaggaaaaatagagagaaacatgaaaatatggctcatcaatggaaaaacctgaactgagataaaccatctctaagaaacctcaaacattggacttcttgaatgaataaaaactttaaagcaactgtcttaaatatgttcaatgaggtgaggcaatgatgaagaaaaaactaaaagaaaatcagaaaatagatttaaaaaatcaataaaaattagaaattgagcaatatagaactaatgcagctgcaaagtacaacaatcaaaaggaagacttcactatagatgttccacagatgtgaacaaccaaagaaaaaaatcagaggccaggtgcggcagctcacgcctgtaatcccagcactttgggaggccgaggggagcggatcacttgaggtcgggagttcgagaccagcctggccaacatggtgaaatctcgtctctaataaaaatacaaaaattagccaggtgtggtggtgcatgcctgtaatcccagttactcaggaggctgaggcaggagaatcgcttgaacctgggaggtggaggttgcagtgagccaagattgtgccactgcactccagtatgggcgactgagactctgtctcaaaaaaaaaaaaaatcagctaaaatcaagataaaacaattgaatctacccattcacagaagcgggaaaggtcaggggatgaaatggaaaaaatgtgtgactggtatacctgccttgccagtaacgttaaaagaagtttattagagaaaagagaaatgacacaagttagaaattcacatcacattaaatgaagacataaaaaatgatttacttttcttatactttcttgatctaatagatatgtttgctcaaaataatagtatcaacaatgtattgggtgttataggtcacaattgtgcaaatgaatgacagtgatgattcatggaatgaaaggaagaagtttcaaacagtttattataccagcactacccctgaagccagtatagtgttttttgaaactgaaggtccattagttgtgaatggtataatatgtatcctatggaattcactaaaaaaattaagaaccaagtactatactaataggataagaaaatcatattctgctcaactaaaatcaaagacggaaatagagaggtagttgagctgggtgcggtggctcaagcctgtaatcccagtactttgggaagctgaggcaggtggatcacaaggtcaggagttcaagaccagcctggccaacatggtgaaacctcgtctttactaaaaatataaaaattagctgggtgtggtggcgggcatctgtagtcccagctactcgggaggctgaggcaggagaatcgcttgaacccaggagacggagattgcagtgagccaagatcgtgccactgcattccagcctgggcgacagagtgacactccatctcaaaaaaaaaaaaaaaagaaaagaaaaagaaaaaaagaggtagttgaaaaaacagacaagtgcaacaaatagaaaacagtaatatacatatacatattaattcaattatgtcaattactacattaaatgtgtattatctatatttaccagtaaaaaagacaaggactggcagagtagaataaaaatacaaagcctagcaatgtgtacataaaaaacattttaaacagaaagacagagatacattaagtagagaaatatatgccattctagccctaatcaaaaggaacatgaaacagctctattacattcagacaaatcgggttttagattaaggaaaattataaggcatagatagtgagttcagaatgataaggaaagtcaatcctacaagaagacataataatccttaatatttatgcccataaaatagaggatcaaaatacataaagtaaaaaattacaaaaaccacaaggcaaaatacacacatctacaattatagttggagggaaacaactcatctctatcaataattcacagatcagtttgtcagaaaatcactaacgatatggctgaaatcaatagcactattaatcagctggatttcattgatacgtgtttacagaatccttcattcaacactagcagggtatatattcttctcaagcccacatgaaatagtcaccaagatgcacaaaattctgagccataacacacactagaacaaatgttttaaaatagaaattccaggccaggcatggtggctcacacctgtggtgccaccactttgggaggccaaagtggaaggattgcttgaggccagactgagcaacatagtgagaccttgtctctataaaagtataaacattagccaggagtggtggcatgcacctatagtcccagataatctgaaagttgaggcaagaagattgcttgagcctaggagttggaggctgcattgaactatgatcatggcactccacactaccagcctgtgtgacagaccaccaccctgtctcttaaaaaagagaaaagagctgggtgcggtggctcatgcctgtaatcccagcactttgggaggccaaggagggcagatcacctgaggtcgggagttcaagaccagcctgaccaacatggagaaaccccgtgtctactaaaaatacaaatagccgggcatggtggcacatgcctgtaatctcagctactcaggaggctgaggcaggagatcacttgaacccaggaggtggaggttgcggtgagccgaaattgtgccactgtacttaagcctgggcaacaaaagtgaaactccatctcaaaataaataaataaataataaataaataaataaaagaaattatataaaatatgtaatcagattataaaccaataacttaaatatagttgaaaagtctcaaaaaagtggagatttaagccacaaatttctcaagtacacagatgtcaaagaaacttgtcacatgaaatgcaaatattatggtgctgatgaaaaaggatatattttagcaaaatctctggaatgcagaaaaggcagtgctttgagggaaacttaaagaatcgaatgcattctctagaaagtaaaactctaaaatcagtgctctaactttccatcttaggaaactagagaatagcaagattaatgtaaatcaagcagaggaaaataacaatgggaagagatattaatgaaatagcaatcaagaaatcaatagaaaacatcaacaggctgggcgcgttggctcatgcctgtaatcccagcactttggaaggccaaggcaggcggatcacgaggtcaggagttcgagacctgcttggccaacatggtgaaaccccgtctctactaaaaatacaaaaattagctgagtgtggtggcacatgcctgttaatcccagctacttgggagcctgaggcaggagaatcacttgaacccgggaagcgcaggttgcagtgagctgagatcacaccactgcactccagcctgggtgacagagcaagactccatctcaaaaaaaaaaaaaaaaagaaaagaaaacatcaacaaaccaacagatgattctctgaaaagatctgtaaaactgataagccgacagcatagttaacacagaaaaaagagaggccatcactactaaccctatggacattaagagtgccatgaaagaatattaggaacaactgaatgcccacatatttgataaattacatggaatggaccaatttcatagaagacacagtctaccaaaactcataaaagtaacatcaagtaatatgaataggtctatatctattgaataaattgaatcaataaatgataaatatcccaagaaaaaggaacagaccaggatgatttcactggtgatttatggcaaatacttatggaagaaatgatcccaattctctacaatatcttccagaaaacagaagtaggtaggtaggtaatactttcttttcttttcttttcttttttttttttgagacggagttttgctcttgttgcccaggctggagtgcaatggcaccatcttggctcactgcaacctctgcctcccaggttcaagcaattctcctgcctcagcctcccgaatagctgggattacaggcgcctgtcactaagcccagccaatttttgtattcttagtagagacgggcttccccatgttggccaggctggtcttgaactcgtgacctcagatgatccatacacctcggcctcccaaagtgctaggattacaggcatgagccaccacgcccggggcagaggtaatactttctaattgatgttataaggccaacattgccctagtaccaaaaatagacagacattacagacatatctccaccactgaggacataaggggaaaactgccatctttaaacctggaagcaggcccttaccagagatctgacctacttgaacttggattcccagcctctactgagaaatgaacaactgttgtttaaggcacgtagtttatggcaatctggtatagcaatcctacgtaattaagacagggaagcgctttctctaccacacatcaaggctttgaagtctacagtaatcaggagagtatggtgttagcaaagtgatgggtacaaagtccaatggaagacagcaaattctggaacaagagcatctatttaaggtatgagaaactatggcacagcaggtattgccaggcagcgatacaaatgacagctacttcaacccaaagaacagggacaaattgttatctccagaagaataaccaatcttctgcctaacacctccatatacaataatcaactaattacagacctgcctgttttcatgaatttttattcactctattacctcagcttccattttgaatgtggttctctacctttctcataccagaaaaagtattttaagagccttgagacagtattcatttttctgtagtcatcatggaagaaagttttttccaatttattttccctgatggcattttctctgctaagccctgaaattctattgagatgatccaattaaaaacaaaacaacagcaacaacaaaaaaacagacctggaaaacttactacacaggctctgtgtagtacgacagaaaagaaaagtaaacaagaattttttaaaggcatataggactagatatatgtaatttgttttctgaaatccaactctttcttgtccctttagaaacatcttctctatcaatctctaatgatagaatgcattttacagctaagaaaaaactgaacagaaatgagtgaacaaatcttttcaaggttgacaacctcagggaggggcagtgctgactggaacacagacaagtctcattcaagggtcaggtcaggtcctcctgtcacctgggacatcccccacccccgtgctgctcactgaagtgctcagtgactactccctacccccaaccaccagataccgcactgtgtactttcaggctcttacaccacctcactggggtaagttatctttgacctttcggatagtttttcttgcttcactagtctaacagaattcaaaggatgggaatcatttctattttaccccctcaataccagcacctgagtggctgaccagccatgtctccaagaaatgaaaactgggcttggggtgagaaaactgagtatcccagggcttaactttttacaagaggataccaggggaatcctcccaccacagggtatccagctcttcccctgggaggccccagccctgcatctcaggctgtcctctgggaggagtggcccaggggctgatattcactaccctccaagacaaggctgctgtatccacttggtgccagtcccaggcagttatcaaagccagtaccaggaaaagatagtgtgggctcaggactcatcagctggtggtttccaaaggggaacctcaacccaaacacttccagataaggtgcctgtgcccagagaagataaaaggagaagaggcgcagacatttttcttgttggtttttacagcagagtggttaaaccacctgacaggtggttattctctgcatcctcacatatgaaatattcacaaacaaaaatcatatcttctaaaaaagaatcatatattgctacctggggaaaaaaatgacagttaaaatactgtatttgtttgaaatacagcctgggggacaaagagttcattatgttgctgtgaactgaggacagtgtagagtcttaattagggaaaaggctaaggggaacaggggaaaaggctgttaaattaaagtcttaattagggaaaggctaaagggaacaggggaaagcagaaagataaaacaaaaaagctataaatctgcctatcttcatgtgcagagaatttaaacaaaagagaatgcaggtaagttacgggtctaactttgttttttttcttttttctttttttttttttttttgagacggagtctctctctgtcgccggcccagactggagtgcagtgacgtgatctcagttcactgcaacctccgcctcatgggttcaagcgattctcctgcctcagcctctcgagtagctgagattacaggcatgtgacaccacgtctggctaatttttgtatttttagtagagaaggggtttcgccatcttggccaggctggtctggaactcctgtacatgtctaactttctttatggcccaagacatggccttcttgcccagataacgcacttaattcacagacttcctgctcaccatcaaacgcctcaatttatcaaacaccggggctgacagaggaatgcaagttaagctccctgctgccttggcactctgctgccttggcactatcaatcagcccaagttccattctataaaatcacccacaagcctctgcttctctcctgcaggcttcccatggcctcccttgcgatggattttgcttctttcgctaataactttacctacaactgtcttagtaaaaattattttaccccggcgttaccggcccagatagcagtcgttcccctgtgacggagaggaagtcagctttatgaaatgcagggcaaaatctggaaatctagggatttactgccagccccaggagttagggtgaggggacaagataagcattagacatctgccttcccaaacctttgaagactcagagggacaccggtcccctttaggaagaaaacagagactgaggatcccacagatcacagctcctcacaggcacgaaccccacacacgagtggggattccctccatgacccttccgtgaccctcccccaatcctggggagatggggggctgcgggcgaggagctgcccagacagggctccgaggccgggaccgcagttgccgcgcagggaccggataggacgcccggggtcccggctgccagctcagcctcactctgtggctgaggggaccgagggtcgagctgcgccagggggactcgggtcccagaccccggagctgacggcgggggaggcccacgttcgccgcggccggttctggacggttccaaccagctctttcccacttttgggacgcctgaccctgcacacgcaccatttcccggcttccgggatgttccagggtcctccctctgcctcccgctgccagtgcgggtcccactgtgacagaggctgccacagacgttccagggcgtctctcagcgactgaggctacacagacgttccagggcgtctctcagcgagcgactgagtctagagctgagcgcaggggcgtgaagacgccgcgggctctttgaacctggcaccctactgccagccgtgcgcctgattgacagttctcacgaccccgccccatagctctgattggatagggctccaggtcccgccccctgggcactgagtgacagaagaagcgatcacacagtgctgagtcgagcgggatgaacgagttccaggcacagcccttgacagggcaggcttcctccctgtgctgtcctgatccctcccagggaacatttgcatttatgcagaattacctgcccgtactcagcaggcccttactgccttttcctcctggagaaggagtcacaagtgttttgcagggaatcccagactcacagtccagtggagccattcccctggcctcagagcagaggggagcccaaggccacacaggccacactgcagcaggagggtggcctgatgtccaccgggcatcaggatttgaggatgagactcttggcggcaaggttaagccttcctctctcaccttgcctctcaatctgctcattttcagccaaggaaataaaaacaagtcaagaacggtattaaaatatcaaatgtgtggaagaactgaaatcacacggcagcaataaatgaatgaatgaatcaaaacaaaaatacaacaggaaaaaaaaagcaaaaacttgaactagtgcagataagcagcctgctgccctcatacttcagcaaacgtcccattcaggaggctaaacatatgcccaaacttggcagccactcttaactgttgaaatggaaccccagagtgaaccaaaacctggtgatgagactgggacactgaaggatttgactctgggagctcaacatacttccctgtgccctctgcagagtgtggaaatgcccccaccgtcaagatgtgcattttcaccaacaggaaagtttcatgtaaagttagtttaagggcccggggcggtggctcacgcctgcaatcccagcactttgggaggccgaggcgggtgaatcacctgaggtcaccagttggagaccagcctggccaacatggtgaaaccacatctctactaaaaatacaaaaattagctgggcatggtggcgggcacctgtaatcccagctactcgggaggctgaggcaggagaatcacttgaacctgggaggcggaggttgcagtgagccgagatcgtgccacggcattccagcctgggtgacagagtgagacctggtctcaaaaaaaaaaaaaaaaaaaaaaaaaaggttactttaaggtactgacctacataaactgtcaaattcataaaccctttacccagattttcctaacacataaatggtaaattctgattctatgtgcagcttcgtgctacgtggaggcgtgcgcaggctgctgaggaagcaccaaagggggctccatttctctccctttgcagccttcagaatgggctcggtgtagagtcactggttcaaactctgctgcccactccaggtggctggggctcagaaaacaataccccaaaaagaagaccttggaagaagcctcagaagcaaaagttttttctccacagagggcagaggaaaaacttagtcccattcttgggactcttagtcctactcttctatccaaggctagccttagaaactagaatctctcttctccaaagtgggtcgtagaatccagaacccttttcccctaaatccaggcataaaatcaaaacatactactctaactttccattgtcctttctgtgtaaaaactggccataagcaaattaactgtccaactttgtttgactgcaggtcagggtggccctggggcttccctgggccacattggaagaagatgaatcgtcttgggccacatataaaatacactaacactaacaatagctaatgagcttaaaaatatatagcaaaaacaaaaattcctaatgttttaagaaagatcatgaatttgtgttgggctgcatccaaagccttcctgggccatgggttggacaagcttgctgtaggtcataagaccctccatttcagagtgggtcctgcctcatactgagaaggaaggaatgcatgctcagaaaggccaagaacaatctagacacacaggccttgttgggtttccccactcagtctgttagcattggatcatactctttcaatctaatcacatttctacacggctgtccatacattaagcctaagcattaaaatgaacaatttcctttgtatctctgggtcttcattctgaagcttcctggatatacgcgttaaataaaatttgtatgcttttcctccaattaatctgccttctctccaattaattcagcaaaacatcagagggcaaaagggaatgttccccatggcctctgtaagagtcttcacttgcttctcaccagcactgatgagttaattgaaacaaagaccctcaattccactgtttgaataaaaaattgacaatcttgggtttcttcctgtgtctatatataaagtagtggaaaaaatatatataagatatttaatagggatttggaaactggtaaatggactgggcatggtgccttgggcctgtaatcccagcactttaggaggcaggggcaggaggattgcttgagcccaggaattggagaccagtctgggcaacacggggagatcttggttcctcaaaaacaaaacaaggccaggcgcggtggctcacacctgcaattccaacactttgggaggctgaggcgggcagatcacaacgtcaggagttcaagaccagcctgaccaacatggtgaaaccccgtctctactaaaaatactaaaaattagctgggcatggtggtgcgtgcctgtaatcccagctactcaggaggctgaggcaggagaatcgcgtgaacccaggaggtggaggttgtggtgagctaagatcgcaccattgtactccagcttgggcgacagagcgagactccgtctcaaaaacaaacaagcaaacaaaaccaactggtaaataattattctgttgagaaacaaacatgctaacaaactattatttttaccttagcaaactgttgtgtaaaacaactaattaaatgtgagctctcctctctccttggcttcagtcactccctgaccttcatagctcagggttgacatcatgtgctctgtgcctggggatggacatgtcccatttatccatctgaaaccccctctcaaccccagcccacaccattgacccaaacagtcatatctgtatctaaatcctaagtattgtacaaatacattttccttttaagcaaactggcccaggttgaattcacctgtggttctcatgcccacagtttcatttattcatttgaaacagtcttctcagatagtaatgtcttgggtgaggacacatccattttatttgcttctgttcttcttaacctgtgtcactacctgctcagtgagggcacagacagaatattctaagtgactatcagctgctgtaaatactggaggtctcagcacaaccctgagaaatccgcaccagagaaaggatgtgtgaataatattaatgtcaccccttaccacaacagttagcttatttctctctttttttttgagacgagctctcgctccatcacctacactggaatgcagtggcaccatcatggctcactgcagcctcaacctcctgggctcaagcgatcctcctacctcagcctcccgagaggctgggactgcaggcatgtcccaccatgcctggctaatttttgtatttttttgtaaagatagggtttcaccacgttggccaggctggtctaaactcttagactcagatgatccacccaccttggcctcccaaactgctgggattacaggtgtgagccacgctgtctggccattttattttcctttctggaaaaaggcttttaaaaatggttttccggttttctggggtactttcatacacagcaatacagatgataaaagtaaacataacaccattcagtttggtttcatttatatgatttaacttttcaacagttaagaaaccaaaacattctgtcaaccttaattggatttccctgaatctaaaaagtgccaggaaaaaaattctacaaataaaaacatgtaagagtcactgaggtggtatgaagaaccctgagaaggtgacatttaatgtgagacatgaaataatatattagtgtaaaaactcagggcaaagccaggtgcagtggttcatacctgttaactccgccctttgagaggccaaggctagaagttcaagaccagcctggggaacagagtaaaaccaccatgtctaccaataaataaataaataaataaaaattagccgagcatggtggcatagaactgtagtcctagctattcaggagactgaggcaggaggatcacttgagtctaggaggtcaagactggagtgagctatgatcacactgctgcactccagctttggcaacagagtgagacactgtctaaaaaagaaagaaaggaagaaaacaaacaaacaaaaaaccctcagggcagaggattcagggtagatggcagggtaccaagcataaagaagctgtctccccacctagacaacagttttactggcagaatctgtctgatggagctattttatttattcttattttttgagacagagtcttgctctgacgcccaggctggagtgcagtggcacaacctcagctcactgcaacctccacctcctgggctcaagtgattcttgtgcctcagcctcctgagtagctgggattacaggtgtgtaccaccacacccagttaattttttgcatttttagtagagatggggtttcgccatgttggccaggctggtcttggactcctgaactcaagagatccacctgcctcggaaagagctgggattgcaggtatgaggcaccacacccggcttgatggagctattttaaaacactacagttggccaagcgcagtggctcatgcctgtaatcccagcactttgggaggccgaagtgggaggatcacctgaggtcaggagttcgagacccacctgaccaacatggagaaaccctgtctctataaaaatacaaaattagccatgcatggtggcacatgcctgtaatcccagctattcgggaggctgaggcaggagaatcgcttgaacctgggaggcagaggtcgcggtgagccaagatcacaccattgcactccagcctgggcaacaagactgagactccatctcaaaacaaaacaaaacaaaacaaaacaaaacaacacactacagtctattgaagccttgaaaattccagaaaatgatttggatggtaaactgtggttaattgtggccatttcaacattcagcataggaccagctggacttctccccactacctctgttgcaggcagccatgcacatgtattttcctccagtttggcagtggggtctctcaggagtttggctatgaactctagtgctgccatgatggggctccaggacatctcgttgtgatgtttacagtgtgctttccacaggacacttcattctggtgaagggactaatgtttaaatgtcaatcagtgaccaggtgtccctcacaggaaacttggtggttatactggccgatgtccttgtggctcttgtctgacatgcatccagttgatttcttttttttttttttttttttttttgagatggagtctcgctctgtcacccaggctggagtacaatggcgtgatctcagttcactgcaacctccgcctcctgggttcaagcgattctcctgcctcagcctcccgagtagctgggattacaagtacccgccactacgcccggctaatttttgtgtttttagtagaggcggggttttaccatgttagtcaggctggtctcaaactcctgacctcaggtgatccacctgcctcagcctcccaaattgctgggattacaggcatgagccaccatgcctggccagcatctagttaatttctatcaaaatagccactctatacagagccttgacctggaaataagttggaattaggtgtagcagtcaggtgagacatgtaggagggcattgagcaggccaatatatgcactgtgggagcttcagaaggagaagagagagagagaaggtgaagggagaatattttgagaaataatggaagaacacattctaaattaagtgaaagccatggatgtagacatccaagaagctcaacgaactctaagtaggatgaatacaaagagaaacgcataaatgcacattatactaaagctgtcaaaagccaaggacaacaaagataatcttgaaagcagcaaaaaagaagtgattcatcacatataaatgatccttcataagatcagtagatttctcatgagaaatgttggagaccagaaaatagtgggcagatgttaatcaaagtgctaaaagaaaaataaatgtggccaggtgcggtggctcacatctgtaatcccagtactttgggaggccgacatgggcagataccttgaggtaaggagtttcaggtcagccaggccaacatggcaaaaccggtctctacagaaaatacaaaaattagccaggaatggtggcatatgcctgtaatcctagctactccggaagctgaggcagaaggatcacttgaacccatgaggcggaggttgcagtgagccgagatcatgccactgcattccagcctggggaacagcgtgagactctgtctcaaaaagaaaaaaagaagaagaaaagataagaaaatgtaaccaggcatatagtcacagctactcaggagactgaggtaggaccacttcggcttaggagttcaagatcagcctgggcaatatagtgagaccctatgtcaaacataaaaacaaaaacagtcagctaggcatgatggctcatgcctgtaatcccagcactttgggaggacaaggtgggcggatcatttgaggtcaggagttcaagaccatcctggccaacgtggtgaaaccctgtctctactgaaaaaaatacaaaaattagccaggcgtggtggcgcaagcctgtagtcccagctactcaggaggctgagacaagaaaatcactggaacctgagaggaggaggttgcagtgagccaagattgcaccactgcactccagtctgggcgacagagtaagactccatctccaaaaaaaaaaagtcaactacgaatctaatatctgtcaatactgtttttcaaaagtgagaaaaaaattaagacttgcccacatgaaaaaactgaggtagttttaaaaattattattagatgtgctctgtgagaaatgtagagtattttgcagtttgaaataaaagaacactgggaaaaaaaaaaagaaaagaacactggatggtatctggaaggtgtaggtggaaataaagatcttagtaaaaagaaatacatggacaattataaaacctattatttttatttatttatttgggacaaggtctcacttccattgcccaagatgcagtgcagtggcacaatcttggctcaccgtagcctcgacctcctgggttcaggtgattctcccacttcagcctcctgagtagctgggattacaggtgcatgccaccaggcctagctaattttttgtatttttagtagatctgcggttttgccatgttgcccaggctggtcttaaactcctgacctcaaatgatccgcctgcctcagcctcccaaagtgcttggattacaggcatgagccactgtgcccagccttaagggctttcttatcattgattactttatatgaaaatgaattaaactcaccaataaaaaggcagagataagcagaatgggtgaaaaatatgatccaactgtattctgcctactagaaactcattttagatctcaagacacaaataggttgaaagggagggcatgaagaaaaatattccatgcaaatagtaatccaaatagaacagggggggctacatcactatcatacaaaatagaatttaagccaaaaactgttaaaggagacaaagaagaacactatttataaaagagtcaatacatacagaatatacaacaattattaacatacttgcactaaacaacagaggcccaaaataaattaaacattaacagaaatgaagaagaaatggagagttccacagtaagagtttgagacttcacactacattttcaagaatggatagaataatcagatagaagatcaataaagaaatgaaataacttcaacaacacaataagcaaaacagacagacataatgacatatacaagcatactccacccaatgacagtagaatacacattctggtcaagtgcacatggaacgctctctaagacagaccataattaggacataaaacacaaaaggtcttcatacaattctaaaaactgagataataagatgtatctttttctttttgagacagggtcttgctctgtcacctaagttggagtacagtggcatgaccacagttcactgcagccttgatttcccaggcttaaataatcctcccacctcagcctcctaagtatttgggaccacaggctggagtgcatgccatcacacctggctaattttttcaaattttgtagagatgaggtcttactatgttgcccaggctggtcttgatctcctgggctcaagcaatcctcctacctgggtgtcccaaagtgttgggattacaggcatgagccaccatatctggcctcagatgtatatttttcaaatacagtgaaataaaactataattattggaaaaaaatacacaaataagtgtaaattaattcattcttcaacaaccaatgggtcaaatgagaaattgcaatagaaaatactttaaggccatgagactctgtctcaaaaaaaacaaaaaaaaaagaggttgggggtggtgcctcaaacctgtaatcccaaaagtttgagaggccaagatgggaggattgcttgagaccaggagtttgagaccagcctgggcaacatagtaagactctatcgctacaaaaaaaattaaaaaatcagccagacatgcacatgcacctatagccccaattacttgggaggctgtggcaagagggtcacttgagcccaggagttggaggctgcagtgagccctgattaggccaccacactccagcctgaatgatagagtgagatcatgtctcaaaaattaaaaaaaaaaaaaaaggaaaagaaaaagagaaaataccttaagaccactgaaaacaaaaatctaacacatcagaacttatgagatgcagcaatggcagtgctaagagaaaattttatagctttaaatgcattaattgcctgggtgcggtgggttacacctgtaatcccagcactttgggaggccgaggcgggtggatcacgaggtcaggagttcaagaccagcctggccaacatggtgaaaccctgtctctactaaaaatacaaaaacttatccaggtgtggtggcaagcacctgtaatcccagctacttgagaggctgaggcaggagaatcgcttgaaccggggaggtggaggttgcagtgagctgagatcacgtcactgccctccagcctgggtgacagagcgagactgtctcaaaaggaaaaaaaaaaagcattcattgaaaatgaagaaagaactccaataagtattctaattcttcagtttaaggaactagaaaaggaagcgcaaacttctttaaaaaggtaggagacaaactgggtgtggtggtacattcctatagtcccagctgctcaggaggctgagggaggagcattgcttgaacccaggaattctaggctgtagtgcaccataatcaggcctgtgaatagccactacactctagcctaagcaacatagcaggaccctgtctttaatattttttaaaaggcactacaaagaagtaaataataaagagtagagcagagataaatcaaaagagaatataaaaacaacagacaatattattgacaccaaaagttggtttgtggaaacaaaatggaagaagaaacaagttctaattcattttgtgaggccagcctcactttgagatgaaaggcaagaaaagacattacgagaacagaaaaagactacagaatatcttttatgaatattgaagcataaattctttttttttttttttttttttttgagatggagtctcgctctgtcgcccaggctggagtacagtggcgcgatcttggctcaccgtaagctctgcctcccgggttcacgccattcttctgcctcagcctcccgagtatctaggactacaggcacccaccaccacgcccggctaattttttgtatttttagtagagatgggtttcaccgtgttagccaggatggtcctgatctcctgacctcgtgatccgcccgcctcggcctcccaaagtgctgggattacaggcttgagccactgcgcccagcctattgaagcataaattctaaacaaaatactggcaaatgtacttcagcagcatatttaaaggattataaatatggaatttgttggccaggaacagtggctcatgcctgtaatcccagcactttcagaggatgaggtgggcagagtgcttgagcccagcaattcgagaccagcctgagcaacatggcaaaaccctgtctctacaaaaaatacaaaaattagttgggtgtggtggcatgtgcctatggtcccagctacccgggaggctgaggcaggagtatcacctgagcccgcaccactccagtccagcctgggcaacagagtgagacattgtctcaaaaaaaaaaaaaaaaaagtgggatttattcccagaatgcaaaagtggttcaatatacagcaatcaatgtaatgtaccacattaacgaagaaaaggcaaaaaacacatttatcatctcaaatgatacagaaaaataatttgacaaaattaaataccttatgttccttttaaaaaatacatttgataaaccaggaatggaaagaaacttccttaataggaaaaaagtcacatatgaaaaacctgtaggtaacatggtcaatttgaaagactgaaagccttccctctaatatcaagaagacaggatgcccactttcaacagttctattcaacatactaatggaagttatagctacagaaataaggtaagaaaaagaaataaaaggaatccaaattggagagaaagaagtaaaattatctgtgtttacagattacatgattctatgtggagaaaacactgaagactccacaagggaaaaataaaattttacagcttataaaacaaatgcagcaatgttgcagaatataaaatcaatacacaaaaatcagctgctaacaatgaataaacaatagactaacaatgaataaacaatccaaaaagaaaattaagaaaataattttagttataaaagcatcaaaaaaagtaaaacacttaaaaataaatgaaaccaagaaatcagtgatgtgtacattgaaaactacaaaacattcttgaagcaaattaaggaagataaatgaatggaaagatatcccatgttcatggattccaagacttactattgctaagattaaaatactaccaaaatcaatctacagaatcaatgtgatccctatagaaatcctaacagcttcttatacagaaatagaaaagcctattctaaaattcacttcaaatctctagggatctctaataccaaaacaatcttgaaaaagaacaatgttgaagaattcacactgccttatttcaaaacttactacaaagctacagtgatcaaaacagtatggtactggcataaagacaaacagataggccaatggaatagagtagacagcctagaaataaatgctcatatacagggtgaaatgatttttgacaacagtgccaagaccgttctttggtagaaggacaatctttcaaaaaatggtgttgggaaaactggatatctacatgcaaataataaaagtgaaccatcacattacatcatgtataaatagtaacttatatttaatcaaagacctatacttaaaagctaaaactataaaatacttagaagagcctgggtacagtggctcatggctgtaatcccagcactttgggaggccgagcagatcacttgaggtcaggaattggagaccagcctggccaacatggttaaactctgtccctactaaaaatacaaaatttagacaggcgtggtggtgggtgcctataatcccagctacttgactacttgggaggctgaggcatgagaatcacttgaacctgaggtggaggttgcagtaagtcaagatcatgcctctgcactccagcctgggtgacagagggagaaaaaaaaattacttagcagaaaacataggggaaaattttgttaaatttggcagtgatttattggatacgacatttaaggcacagacaaccaataaaagataaactggactacatcgaaattaaaaacttttgcgcaccaaaggacaatctcaagatgaaaagaaaacctacagaaagggagaacacatctgcatatcacatatcaaataagggcttaatacccacagtgtataaagaattcctacaactctcttccaagcacttgggagctgaaaaaagaaagaaattttctaaatattaaaaactaaaaattttaaataagaattcctataactcaacaacaaaacacaaatgactcaattttaatgagcaaaggattttaaaacaaactggttcaaaaaatatataaacaaccaacaaaaacaaaaaccaatgtgcattattattggtcattagggaaatgcaaatcaaaaccacaatgaaaaagcagtacagaaccattaattggctattatgaaaaaaatacgacaaccagtatatgtgacaatgtggaaaatagaaacccttatgcattgctggagagaatgtaaaacattgtagccactttgtaaagcaatatacctgttcctgaaaaaggtttacaccaattattctgtgaaccagcaattacactcctagggatacatatatccaaaagaattgaaagcagggactcacacagacatagacataccacatccacagcagccttattgatagcagtcaaattattactgtggaaacaacccatgtttatcaacataaaaatggataaacaaagtatgctttaaccatacagtggaaatttattcagacacaaaaacaatgagttcctgatacatgctaccacatggataaaccttgaaaacgttctaagtgaaataagccagacatggaaggacacatgcatacttccacatatctctctctctatgaatagtcaaattcacagacagagaaagtagaatggagattttcagtactttgggataggatggaataggtaattacatgtatggaacactaagtagatagagcaagtagcacagtaacacgtataaaatgatcccttcctttgtgtattctagtttgtaccagcactgtaagaggcttccagatgagcagttccagtggttaatgttggtagttcaaagggtaacactgccctctaggcaacatcgtggaggtctatttgagatatatttcactacaagttattctcatgaatacttcaatgaaacagctcttatcaaggcccccagtgaccaaatacttgccaaaatctacagtcaaccctttttccttgtcttattcaaattctcagtgacctgtgacacagctgaccactctccccatattgaaataccttcttctggaggcttccaggagaagaaacccatgttttcctcctactacttcattgggtgttggaaaccattatggagtgaggaagtcaatgatttcaggagcttctccactattgatgaagtatcaggaatatctcaaatgctgcaagggaggttggtggggaaaacaatctatgacatgcttgaagactttattgaggaacacattgacaggacaagagcaccgccatctttataacactccaccatcctaagctttaagtttctatttggccacctggccaaaactgaaaatgtcagccccgcccataacttcaacagagaataacggccctaactgtaacagaacagccaggacttccccaacccctccctaacagaattttgtttcaaagcacacttctccactgggccctttaaaaaagcctcaggctgtaagagaagtttgcacctgaccctgccgctggaagcccttctcaggtttactcccaataaaactgtctcaactgttgagccaccttctcatctctcctttccttaatctttctatcccaacacaaataagagagcataaatactaacaaggaactcgaagatatactgaaattctctgcagataatgatgataatgatgatgcagaagacttagaagaggtaatatcaaagatgtgacacttgaaacatgtgcagcagtttttggggcatctacagcctctgcaaggtgaaaagtattaaagattacaatcctcgcagggcacggtggctcatgcctgtaatctcagcactttgggaggccgaggcaggtggatcacctgaggtcaggagttcgagaccagcctgaccaacatggtgaaaccccatctctactaaaaataaaaattagccaggcatggtggcgagtgcctgtaatcccagctactctggaggctgaggcaggagaatcgcttgaatctgggaggtggaggttgcagtgagtcgagatcgcgccactgcactccagactgggcaataagaacgaaactcagtctcaaatgataaataaataaataaaaataaaaataaaataaagattgccatcctcaagtaagatccttcaatggaacaaaacctctgtgtcacccaagggataacatgccaacaaacactgcaaggatatttaaagaaaaagaaccagcttcctacaacaatgtttctaactaaatatctgcaaatatgaagacagatccttcagtgtgtacacatcttcagccctcatgctgaacagattctgacattagtattatttagtctcttccaaactcagcatctgcaatcagaacctggttcatccaacacagatgatcatcctgacatcctgtcaagattcaagtgagcctgatgtctcactgtttatctacagtgccacccatctagtcacctcagtgaatcatattaggcaccatactgtaatcagcatcatcatgatcatgatcatcatcatcatccttgggttatcaagcaagaaggatcaggattttcataagtgttaacacacgattccaggtcattaaataaaagcaatctatgattgttgaaaaaaaagaaactgtagattacaggctcatgcctgtaatcccagcactttgggagaccaaggcaggcagatcatctgaggtcaggagttcgagaccagcctgaccaatatgatgaaaccccgtctctactaaaaatacaaaaaaaaaaaaaaaaaaaaaaaaattagctgggtgtggtggcatgcatctgtaatcccagctactcaggaggctaagacaggagaattgcttgaacccgggaggcagaggatgcagtgagctgagattgtgccattgccctccagcctgggcaataagagtgaaactctgtcttaaaaaaaaaaaaaagaaaaaaagaaactgtaacattctaggtgacatgtactatgtaggcaggcctgtgatggttgggtctgttctcaacagcacaggattattttcatatcacgattctctaaaaaaaatacaataaaatgactgtttacatagcttttacaacacatgaggtattttagtaacctactttttatttttacttttacaaaagctttgggttggtgaaaaattaagtaatctaggcatgatttatgggatgcaggaggatgtggataggttacatgcaaatgtccttttataaaaggaacacagcatctgtggatttaggtatgcttagggggtctggaaccaatcccctgcatatggttaggggataaccatattcaaaagaaacatcttaaggctttaccatgtgtttgcattcatgaggcttatctcctatgtgatttctttcacgtttctgaaatgaaataaaattaatgaatgcttttccacatttatagagtatctctccagtgagtccttttatgtctatgcaaggaactgagagaactcagtgccttcccacattccttacattcatgcatcttctctccagtgtgagttttttcatgtcctcgaaggaaacgagaacgagtgaaggctttaccacattgttgacattcataagatttctttccagtgtgaattctttcatgtcgcagaaggcaagtgagccaagagaatgctttcctgcattccttacattcatatggcttctctccagtgtgaatcctttcatggacttttaagttaccaaaatgactgaaggctttcttacatgttttacattcataaggtttttcagccatgtgagtccttctatgttgagaaaggtatgtgaaacaactgaatgctttcccacattccttacactcatatggcttctctccagtgtgagttgtttcatgattttgaaaggaatagaaatcaataaaggctttcccacatttacatttatagggtttctctccagtgtgagttgtttcatgtcttcgaagggaactagaaatacggaaggctttaccacattctttacattcatagggtttctcaccagtatgagtcctttcatgtccttgaaatacactgggataaatgaaggctttcccacataccttgcatttgtgaggtccatctccagtgtgcattatcatatgacttcgaaagcttgagtgatgagataacgctttcccacactgcttgcattcatagggtttctctccagtgtgagttctttcatgactttgcagtgaactaggacaatcaaagcctttcccacatatcttacatttatgaggtccatctccagtgtgccttatcatgtgtctttgaaagcttcccagatgatgaaatgctttcccgcattgcttgcattcatagggtttctctccagtgtgagttctttcatgtattcgaagggaactggaaacactgaaggctcttccacatcgtttacatttatagggtttttctccagtgtgagttctttcatgtcttacataggaactgtaatcagggaaggctttggaacagtgcttgcattcatatggtttctccccagtgtgtgttctttcatgtcttagataggaactgtaaatagggaaggctttacaacactgcttacattcatacggtttctctccagtgtgagttctttcatgcatacgaaataaactaggccaaaaaaaggctttcccacacaacttacatatataaggtccacctccacgttgtactattatgtgtcttcgaaggtttcccgaagaactgaaggttttcccacattccttacaatcatagcgtttctttccagtgtgaggtctttcctgtgtttgaaaggagtggtgataattgaaggctgtcccacattgtttatgtgtatgtggcttctctccatattcctgacactcatctggtttgtgtccagcatcaaatgtgatatagcaattaaggaatgaacaacccatgatttctccacacacactgcttttacatggatctactccaggaggtttttcattcacagtactatctggctggcgactttcactaaatctctctatgatatgacatctgtaaaacatgagaagtatattaataaaggtttatttataaatgactttatgtttattagtaggtactggatttacatttttacatcatcatgcaacgtgtaggcttcatgcactgcttgaacgtgaatggactgaatgttgtacaagataactcgaccccagctgttttcttgacaatgataaacacatgaaattcttttttttgagatggagtctcgctctgtcgccaggctggagtgcagtggcatgatctcagctcactgcaacctccgcctcccaggttcaagtgtttctcctgcctcagccgcccgagtaactgggactacacacatgcgccaccacgcccagctaatttttgtatttttagtagaaacggggtttcaccatgttggccaggatggtctcaatctcttgaccttgtgatcgctcgccttggcctcccaaagtgctgggattacaggcgtgagccaccgtgcccagccgaattcttaatattgtttctaagggaactatttttgcaaacactgaatagttatatcacatttaagtatatgtttctggagaaaattgtataggaataaataagtttgtactgggctcgttcattttctttgcctagttgtataatttcctgtcatcctaagaattgctccacagatatatgtctttctcttgtgagtgcaaattaccttaggctcctcctgggatttctgtgctgatcttcaatgtttgtgtcttcccatttcattcctaaaaggtggacacagaaaaaacactgtagattattataaaattctaaaaacactacaagattttatgtacaatggaatcatgcatgattcattcactgaattgtagctgactcttgaacaacataggtttgtacctcgtaagtccacttattttatgttttttaagatggagtctcgctctgttgcccaggctggagtgcaatggtgcaatctcggctcactgcaacctccgcttcctgggttcaagccattctcctgcctcagcctcccaagtagctgggactacaggtgtgcaccaccacacccagctaatttctagatttttagtagagacggggtttcaggtgggttttgaactccagacctcaggtgatctgcctgcctcggcctcccaaagtgctgggattacaggcgtgagccaccacacctggctcacaagtccacttatatatgaattttcttcagtctctgctacccctgggacaccaagaccaatccctcctcttactcagcctactcaatgagaagacaatgaggatgaaaacctttatgatgatccatttcaacttaatgcacagtaaatacagtttatcttctttatgattttcttaacatttattttctctagcttacatttttatgagaatatagtatgcaatatatgtgacagacaacatatgtgttaattgattgtttttgtgaccaataagcctgccagtcaactgaaggttaagttgtagtgaacaaaaagttatatgaatatgtacaactggttggggacccagcaccacttaaccctgtgttgttgaagggtcaactatatcccctttcggtatttcaaatcattcaacagcattgatgaccaagaaaaaaatgtctctaattgactaagtgaagacataatgtcatttttacctatacagtccaggttcctaatggtttcccacatcacatctctgtacagactcttctgtgatggacccagcaaagcccactcttcctgggtgaagttcaccgccacatcctcaaaggctactgaatcctgaaacaccccacatgtacaaaggagtaaggctgagactgatagtaccaaaaatttacacccacttcataaactttgcatactattatttctaagcaatgattcaatgacatggtaaatccacccttattctctgtctacaatcactttctccaacacagcaattctgatgctagaattgaatgttgttgtacacataatagtcaaataggaacaagtctctttttgatgacttaaatgagtgaattttattgccggcatcatccctaatgtctactttatagtgggtctgtatttcctgtcgtgacaaagtcctactacttactgtacaagaataggagtcctgagattgtatatatttacaaatgctggttaacaaaattggatccttcgtgtactctaggcactggatttatagagggtctccaccaacataactaataacaggtgctgagtgtgcataaactgtttatggagaaagtatagtatttgcttaactcttaccttctcttcgggagcttggaattttgttacatgctcagcagtgggagcatagctgatcagccaatgctaggtttgaatgtttgtccccaccaaaatgcatgctgaaacttaatccccaatgtgacagtaatgaaagatggcgcttgaagaggttattgggtcttgaggatttggatctcaagaaaatcaagattaatccattcttggattaatggcttaaagaataaatgggtagtgacagagttggacttatgtccctatgagaagagaaagagacctgggctagacactcagctccctcatcacatgacgccctgtgccacacagggactcgacagagtctccaccagcaaggaggttctcaccagatatccagccttgactttggacttcccagcctccagaaccacaaaatatatacactgtttcatttaaatcatctagcttcaggtattctgttataagcaacaaaaaacacactaaggtagacacaaagaaacactctgggcactgagtctctaatgaatgacatccataaataacttttcaaaatgtttattgcaacatgttacttggggattcagcccatcctatgtgattacactaagagagaacatttagaagccagcaacaggtttcctctagatcaaatgtagcaaagcaagacaaaagactaataaaagatgcttcaccatcccaatgcaagaattttaaactttttattaggtaatgtcaaaggagaataatggggacagattgcacatgttcttagaaagaactcaatgttacctctcatgaatatcgataatattccctaaatagctaaatcagaactttagtagtcaacaaaaaaagatatccccaaaactaacagaagtcacaaatgtataaaaatgctaaaaactttctcaccaacaaagttacggctttacaagaacagataaagaattttttttttttttggaggggggagacagagccttgctctgttgcctaggctggagtgccctggcacgatcttggctcactgcagtctctgtctcccaggctcaagcaattctcctgcctcagcctcctgagtagctgggattacaggcgtgtgccagcacactcagctaaaacatttatgatgattcatttcaacttaacgcacagtaaatatagtttatcttcattattttcttattaacattattttctctagcttactttactgtgagaatatagtacgcaatacgtatgacagacaatatatgtgttaatcaattgtttttgtgaccaataagcctgccagtcaactgaaggttagctgtggtgaacaaaaagttatatgaatatgtacagacctcaagattaaatgagaaaaaaaatacgtattaaagacaaaactaggccaggagcggtggctcacgcctgtaatcctagcactttggaaggttgaggcaggcagatcacgaggtcaggagatcgagaccatcctggctaacacagtgaaaccctgtctctaataaaaatacaaaaaactagccgggcgtggtggcgggcacctgtagtcccagctactcgggaggctgaggcaggagaatggcgtgaacccaagaggcggagcttgcagtgagccgagatcgcgccactgcactccagcctgggtgacagagcgagactccatctcaaaaaaaaaaaaaaaagaaagacaaaactagtattttaaacagtaacaaggtctttttcagatttaatgagaatttttttttttttttgagacggagtttcgctcttattacccaggctggagtgcaatggcacgatctcagctcaccacaacctccgcctcctgggctcaagcaatgctcctgcctcagcctcccaagtagctgagattacaggcgcacaccacacgcccggctaatttttgtatttttagtagagatggggtttcaccatgttggtcaggctggtcttgaactcctgacctcgtgatctgcccgcctcagcctcccaaagtgctgggattacaggcatgagccaccgtgcctggccgaggattttcttaagtaagaaaataaaggccgggcacggtggctcacacctatattcccagcactttgagaggccaaggcaagtggatctcttgagcccagcagttcaagaccagcctgggcaacatggtgaaacctgatcactagaaaaaatacaaaaatttgtccaggagtgggggtacatgcctgtagtcccagctacctgggaggctgatgcctgtagtcccagctacctaggaggctgaggtgggaggatcacctgaacccagggaagcagaggctgcagagagcctggatgacatcactgtactctagcctgggcaacagaatgagaccctgtctcccctcaacctcccaaaacaaagaaaagaaagtagatttcaaatgaggagtcttccaaattcaactatattaaaattaggcatagtggctcacacctttaattccagcattttgagaggctgaggtgggaggatcccttaagcccaggagtttggggctgcagtgagctgtgatggcgccactgaactctagcctggggtcacggagcaagattctatctcaaaaaaaagtccatcaaactgtagaatgaaataaaaagataaaccaccatctggaaagaaatactagcaatccttccatgtgaaaactggttagtatgtacagtatgcttaaaaacaaaaagaaaggccaggcgcggtggctcacccctgtaattctagcactttgggaggctgaggagggcagatcacctgaggttgggagttcaaaaacagcctgagcaacatggcgaaaacctgtctctactaaaaatacaaaattagccgggcatggtggcgggtgcctgtaatcccagctattcaggaggctgaggcaggacaatcgcttgaacccaggaggcagaggttgcagtgagctgagatcgctccattgcactccagcctgggcaacaagagtgaaactccgtctcaaaaaaaaaagagagagagagaaacaaggcaaggcaataatatccaaataaattaaacatgaaaaaagacagaaaattacttcacagaagatgaaagaccacaaagaaaaaaatgctcaacaccaatgctaatcagcaaaaaccaatggagatatataaaacataaatctttacaaggcataaacacacacacatacatggtctgagagctgatctacacctgctattaggatttcctcataaatttaaactatccataatctacaatacaacaattttttcccaatgaatagtatcccaatgagttaaaaaagtcatgaagtgttagcacttagggacaaaaaaagaatattttcaacaacatcataaggttaacctgaaagaactcaagtcccatgaacagtgaaatgtgtgaggacttggtgacccacagcctcagacaacagcgtatgtcaaacagattgaagcaaataaacaaatcaaaaaccttttcatcgtattttctcccctctcctttcatctcttcatgtctttggagtcaattaaatatttttcattattccaatttgtttattttctttgcattttagttctattttttttgcattacattttaacaagctgctcctgggaagcagttctcatactttatgtgcattacaagcatctggaggacttaacacagattattggatcctacccccagaatttctttttctttctttttttttttttttttttttggacagagtctcgctctgccgcccaggctggagcgcaatggtgcaatctcggctcactgcaacctccacctcctgggttcaagccattctcctgcctcagcctcccaagtagctgggattacaggtgcccatcaccatgcccagctaattttgtgtatttttagtaaagacggggtttcgccatgttggccaggctggtctcgaactcctgacttcaggtgatctacccaccttggcctcccaaagtgctgtgattacaggtgtgagccaccatgcccggccctacccccagaatttctaattcagtaggactagagtataatcctgaaatgtgcattcctttttaaattttgatgttgtttgtacatattcacggggtacaggtctaatgttgccacaatgatatagtgcattgtggtgaatgaagtcagagccttcggtgcatccatcactgcagcaaagcacatgcatccaccaagcaactgcccatcatccaccatcctccaccctcctagagtctccactgaccatcattccacactctgcttccatgtttacacattatttacacgtgggaggtatatttgcccacctttttttttttttttttgagatggagtttcgctctgtcgcccaggctggagtgcaatggcgcgatctcggctcactgcatcctctgcctcctgggtttaagcaattctctgcctcagcctcccaagtagctgggattacaggcacccaccaccatgcctggctaaatttttttgcatttttagtagagacggggtttcaccatcttggtcaggctggtcttgaactcctgacctcatgatccacctgccttggcctcccaaagtgctgggattacaggcgtgagccaccgtgcctagcctactcacccacttttaagtgagtacatgtggtatttgtctttctgtgtctgaattgttttgcttaagataattgcctcccaatccatccttgctgtcacaaaggacatgatttcattctttttcatggctgaatagtatcccaatgagtatacacaccacgttttatttacccaatcctccacttaggtcgattcccttatctttgctttgtgaatagtgctgcaatatgcagataagtgcaggtatctttttggtgtactgatttcttttcctttggatagatacccagtagcatatctgagacactcagcataatactgagtgcatattaatggtaacattaactaactgaaaacagaaaagaggcaaaactatgctactggataaatacacactgaatctataatgagcaacaaaatacaaactctaggtcagttatgcttctgacctgtagtgtcttacctcacacaacttctgacaacaaatgtatggcatttgctgaacaccaattctccaacaaaaactggtatccaccccacattagtacagaccccacaagttgagggttgaatgtcacaaccaatcagccaccaggcagatgccagtggcaagccccagagaccatccttttaatcaaatgtgtataaaaccaatgactccctctacagggtcaataatgtgccaagccaacccacagaactcagcaagtcactctgcttaaggttgtcagtttgttataaaggatatctcaagaatagccaaaaagagagaggcacagcaaaggaaggggagggattggcaaaccttcccctcttggctgacattacccacccagcaaatccaaatacattttttattatatcaaagacccagataaactctcagattcataaaccctttttccatcaggcagaatcaaaaggtgtctttctctaaatcagctgtgacagactttttaatttgtactgattataccaactgagtgaatgcaaaaccaggctgctgataatgttgaattttacccaaggcctgtaattctagtaaataagtaagatgacagaaaatcacctcaactccccaagcccagttctttgtgttctggacaagcagccgtaaaacaaaacaaaataaaagcaccctttgcttacatagattatgcccctccccccttctctaaactataactcagccagataaagaacctccaaattcccattttttatcttatgattagctgagcagttttgtcttcactgatcatactgaacaaaatacatctaaagaaaactttgcttaagtttttctccttgctccaggaccgtgaactttgactcatcctcagcctgagccagcacaaaacccctccttcataacccatcttaagaacagacttaggttagagcaaaacactctctgaactagaatctgattctcggcccggcgtggttgctcacacctgtaatcccagcactttgggaggctgaggcaggcagatcatgaggtcaggatatcgagaccatcctggctaacatggtgaaacctcatctctacaaaaatacaaaaaattagccgggcgtagtggcatgcgcctgtagtctcagctactcgggaggctgaggcaggagaatcacttaaacccgggaggtggaggttgcagtgagctgagatcacgccactgcattccaacatgggcaacagagctctcgagactctcaagaaaaaaaaaaatctgattctcaccctccatcctgccctccccttcgcatcttccttctaatcttggttgctcttcccttagcaagaaaagaacttttctgcccaaccttagagatgcctcagatctttattttattttattttttttgagactgagtttcactcttgtgagccaccgcgcccagctgggatgcctcagatcttatacttgatgctttcccgttttgcagtactcctttagaatgaagtcacttcttagctaaatgcagatttattttaattgagaatgtctagcaacagccccacaacagtaacaaatacaacctcaaacagggaatcaccccaactgccccagctttctaatgctctgtagcttctttaagtataaaaggcttctcccatggctggagtgatccggaggctcccaggaagaaccaatttaagtgggccttcaataacctccctttgcaggctccagactggcctcaactgggagtcaccggcctcaggcctctccaccccactcacttcctcccatgccttacatggaaagttacttggtttagttagcatttatttatttattagttagtttagttagtatatatttatttatagatgaagtctcactctgtcacccagactggagtgcagtggcgcgatctcagctcactgcaacctacactttccaggttcaagtgattctcctgcctcagcctcccaagtagctgcgacttcaggtgtgggccaccacgcccgtggtggtggtgggcgcctgtaatctcagctaatcaggaggctgaggcacgagaatcacataaacctgagaggtgatgctcgcagtaagccaagattgtgccattgcactccagtctaggcaacagagcaagattccatctcaaaaaaataaaaaaataaaaaataaaggtaggctgggagcggtggctcaagcctgtaatcccagcactttgggaggctgaggtaggaggatcatttgaggttgggagttcaagaccagcctgatcaacatggagaaaccccatctctactaaaaatacaaaattagccgggcatggtggtgcatgcctataatcccagctactcgggaggctgaggcaggagaatcgtttgaaactgggaggcagaggttgcagtgagccgagattgtgccattgcactccagcctgggcaacaagagtgaaactccgtctcaaaaaaataaaaaataaataaaactaaataggaaaagcacaagtatctacccatttcaggcaacaaataccatttaattactacttccataataataaagcatttagtaaattaataatatttgagttctttagctgttggaaagtcctgtgccacagcatttagcattaatctgtcaagtacacataataggaatagaacagttatccactgtcctaaattccccaccctaaaaaggaaagaaactaaagttttggtaaatctttataattcaatcaaataagtaccacattttctgttaatatgtgttcactttttctgcagccataaagaaagtacgaccaaacatttttccttagtcatactgtcactgttaagccctgaaattccatttgaataatcagagaaacttacttgacagactgggggaaaaaaaaagtaaatgaagggtttttttgtttctacaaaaattggacctccccctccccctctgcctccccctccccctctcgctgtccccacggtctccctctccctctccctctccctctccctccacggtctccctctgatgccgagcggaggctggactgtagtgccgccatctcggctcactgcaacctccctgctggattctcctgcttcagcctgcggagagcctgggattgcaggagcacgccaccacgcctgactggttttcatatttttttggtggagacggggtttcaccgtgttggccgggctggtctccagctcctaaccgcgagtgatctgccagcctcggcctcccgaggtgcagggattgcagacggagtctcgttcactcagtgctcaatgttgcccaggctggagtgcaatggcgtgatctcggctcgctacaacctccacctcccagccgcctgccttggcctcccaaagtgccgagattgcagcctctgcctggctgccaccccatctgggaagcgaggagcatctctgcctggctgcccatcatctgggatgtgaggagcccctctgcctggccgcccagtctgggaagtgaggagcacctcttcctggccgtcatcccgtctaggaagtgaggagcatctctgcccagctgcccatcgtctgagatgtggggagcgcctctgccccgccgccccatctgggatgtgaggagcgcctctgcccagcggcgaccccgtctgggaactgaggagtgtctctgcccgaccgccaccccgtctgggaggtaaggagcgtctctgcccggccgccccgtctgtgaagtgaggagcccctccgcccagcagccgccccgtctgggaagtgaggaatgtctccgcccggcagccgccccctccaggaggtgggggacagctcccgcccggccagccaccccgtccgggagggaggtggggggcagcccccgcctggcagccgccccctccgggaggtggggggcgcctctgcccggccgccccgtctgggaggtggggggcccctctgcccggccgccaccccgtctgggaggtgtacccagcagctcattgagagtgggccatgatgacgatggcggttttgtcgagtggaagtgggggaagtgtggggaaaggaaagagaaatcagattgttgttgtgtctgtgtagaaagaagtagacacgggagactccattttgttctgtactaagaaaaattcttctgccttgggaaaaaaaaaaaaaattggaggctgaggaggcagatcacttgaggtcaggagttcaagaccagcctggccaacatagtgaaaccccgtctctactaaaaatacaaaaaacaaaacaaaaaaaaaattagccaggtgtggtggtgcaggcctgtaatcccagctactcgggaggctgagatgggaggatcgtttgaacccagaaggcagaggttgcagtaagctgagatcgcacaactgcattccagcctgggcaacagtgcgaagctccgtctcaaaaaaaaaaaaaaaaaaaaaaggaatagatggctacatatgtgacctgttttctgaaatctaactatttctggcctctatggaaatactttctctatcaatctctaatcttatagttaataaaacgttgaagctgaaaagagtgagtatctcttttcaatgtgacaacctcagggatgggcagcactgactcgaacacaaacaagtctaactcaggtgtcaggtcatcccatctcctgggacattagtcacccccatctgctcagtaaagtgctcagtgaccacccaccaccaccccaggagatacttcactgtgtgcttttcaggctcatgcacacctgacctgaatgggaggttcttgcacaactggaatgagtgggttctccagtgcttacatattgttttctctcttcattagtctgagagtcaggaaggaagagatcacttctgtcttctcccccaaatacaatcattcaactggctgaccagccgtgtgtccccaaggaatggaaactggggttggggaagaacaaggtgattgtcccaagggttagctttttatagaaatggtataccagaatattcctcccatcccacccagggcatccagctgttctctgtgaggccccaccccaacacctcaggctgctcactgggagaaatgacccagggactgatattcactggaccctcccagagacagggcagctgtgtgtatcttgggtcaaccccaggcagttctgaaacagaaccaggaaaaggcagagagtgggctgagaacacatcaccccataaagtttctaaaggggactttcaatgttgattaggtatccgtacccaggggaaagaaaaggagagacacaaaggtttttttgtttgtttttttgttttttacagtgcagtgtcaggttattctctgcttcctcacatgtgaaatgttcaggaacacaaatcttttaagaagccggccgggcgcggtggtcacgcctgtaatcccagcactttgggaggccgaggcgggcggatcacctgaggtcatgagttcgagatgagcttggccaacatggtgaaaccccgtcgctactaaaaatacaaaaaattagccgggtgtggtggtgggtgcctgtaattccagctactcgggagggtgagacaggagaatttcttgaacccgggaggcggaggttgcggtgagccgacatcgcaccattgcactccagcctgggcaacaagagcacaactccatctcaaaaaaaaaaaaaagaaagaaagaaaaaaagaagccatccattgctctctgaaaacaaaatgaaaattaaaatactgggactctgaaatttagcacgggtggggcggaggagggaggagttcatgatgttgctgtgaactgaggagggaaagttagcctgcgtaaggctctggaaaccaagggagttactaccacccctaggaggagttagaatgagggaacagggtagtggatttgagaccctgctacccccatctctgaaaaactcgaagaggaatcagtcaccctgggaagaaaagaagggactggggaccccgcagaccacagctcctcccgtgcacaaaccccacgcaagaatctggattctgattgcagttagatattaaccaggtaccctgagccccactgcctcgcgggggccgccttcctgagagtcaggtcacagaagacactgaccgccggcttctgcattgtgcctggggataagatctcggagagctgctcgagttgcccaagttctttctcagatcttgaattccaacggaaaggctggcgccaagcagggtgaaaaccccacgagggaacccactcagcaggagaatgcggtttcttcacctcccgtcccaggattcgcctgtcacttccccaccaaccagcgaccccacacttcagccgcccctgtccagacccctaaacacccccatccccaaacctctcatggaggcggaactggggtcttctctcctctccccctattaaactgtttctgctgcaggccttggagtctcggtgcagtgactcggaccgcgaacctgtgccggttacagccgcacaatctgggaagacgcggagctgtgggcatggagctgccccagagagggcgcgggagccggggccgcagttgctgcgcagaaacgggacaggacgcccggggtcccggctgccggcccagcccccagctcccaccccgcggccgaggggactgaaggccggctgggccaggggaactcgggtccacagaccccgcagtcgccgcggggacgcccgggtcccgccacagccggttctggccggttccaaccagtccttcgccctgccccaggacgccgggccccgcacactcaccatttcccggcttccgcggtgtcccgtgttctccccaaggttccccgctgccagcataggactcagcgtgacagtgcctgccactgacctgccagggcttctctcagctacagagccaggagcgggagctcagaggggtgtagaaagctccaccctcctcccggcagcgcgcctgactggcagttcccaagaactcgcccccaacactgattgggtagagctccaaattccgcccccccagggaactgattgacagaagaaggatcttacacggctgagtggagcgagatgaagcggttccagacacagcccttgatagggtgggcttcctcccttcgctgtgacctgacccctcccaggggacatttgcatttaagcggaatttcctgcctgtactcaatgggctcttcctgctccttcttcctggacggggacccacaagtgtgtgctgggaattcgagactcactgcccagtggagccatcccctggcctcagagcggtaggggaggcccaggccacacaaaccacactgaagcaggagggaaggcctggtgtcctccagggatcaggaatttaggatgagactgctggctccatggtcaagcctttctcccaccttatctcccaatctactcattctcagaccagaaaataaaaacacatcaacaatgaaataaaattgttaaatgcatggaaaatctggaattatatggcagtaatcttctataaaggaatcaaaagaagggaaaagaaaaaacctgaattagttcagagaaatttcagccacagttcagcaggaaaccccctttcaggaggttaaacatattttcaagcttagaaggcagattctgactcctgaagttgagtcccagagtgtgtaaccagcagcttagcagctgagtctcaaaccacgttttaaaccttttttttcttcttctttcccttttcctctttcccctcctgatctcaagataataacttcgagataaactgcatagatgttacctctcatcttaaaatacagcctcagaatgtgctgtgaacttccactccctttcctttcccatactacactgccatgccttatgcacatttatttttattttatttttttggagacggagtctcactctgtcacccaggacagactgtagtggctcaatcttggctcactgcaacctccgcctcccaagttgaagcaattctcctgcctcagcctcccgagtagcacactggactacaggtgcacgctgccatgcccagctaatttttttgtattttagtagagacagggtttcaccatgttgcccaggctggtcgtgaactcctgagctcaggcaatccgccggcctcggcctcccaaagtgttaggattacaggcgtgagccaccacgcctggcctgtgcacatttatttacctaaatacttattaagcacacaccatgctctcttatttggtcatatatttccttagaagcttcaggggttggatcttgttaggtaccaggcacctctggaattctctttccaacaaaagattacttcaaagacagaacccacacccagctgaagagtgactactatcggggaaaccagcccccaatatttcaacgtaggttctattttccctaagtgtcggcccatctgagaaattaagagaaagagtacaaagagaagaattttacagctgggcctccaggggtgacatcacatatcggcaggttccatgatgcccacctgggctgcaaaaccagcaagtttttattagggattctaataggggagggggtgtacgaacagggagtaagtcacaaagatcacatgcctcaaagggcaataaaagatcacaaggcaaaggcaaaattagaattactgatgagggtctgtgtcctgctgtgcatgcactgtcttgataaacatcttaacaggaaacagggttcgagagcagacaaccagtctgactagaatttaccaggctggaacttcccaatcctagtaagcctgagggcactgcaggagaccagggcgtatttcagtccttatctcaactgcattaagacagatactcgcagagcagccatctatagacctacccccaggaatgcattccttccccagggtctcaattattattattatatatatttttttgagacagagtctcacgctctgtcccccaggctggagtgcagtggcacaatctcggctcactgcaacttctgcctcctgggttcacactgttctcctgcctaagcctcccaagtagctgggactacaggcgcgtgccaccatgcccggctaattttttgtatttttagtagagaaggggtttcaccgtgttagccaggatggtctcgatctcctgatattgtgatccacccgcctcggcctctcaaagtgctgggattacaggcatgagccaccacacctggaagggtctcaattattaatattccttgctgggaaaagaattcagtgatatttctcctactcacatgtccgtctataggctctctgcaagaagaaaaatatggctttattctgcccaaccccacaggcagtcagaccttatggttatctttccttgttcccagaaaatcgctgttattctattctttttcagggtgcactgatttcatatcattcaaatacaaatgttttacaaacaatttgtacagttaatgcaatcatcacggggtcctgaggtgacatacatccttagcttacgaagataacaggattaagagattaaagtaagacaggcataagaaattataaaagtattaattttgggaactaataaatgtccatgaaatcttcacaatttatgttcagagactgcagtaaagacaggcgtaagaaattataaaagtattaattttggaaactgataaatgtccatgaaatcgtcacaatttatgttcttctgccgtggcttcagccggtccctccattcggggtcccttagttcccgcaacagactacaagattgactgcaactaatgtataacctggcaggatccacgacggagaagtcccttcaccaaatgggacaataattcaagaggggcaaccagagcaagtcacgccacctggtacctctagccccgcttgcctcttctgcattccaaaccctttctttaaaaacccctgggttctctccacaaattgaacagtggaattgctttctgctcttcccctgctaggacagataataaagaaatctcgttccctcttatcacaactcattattattttgacttctttccacacgcggtgagcagccagacccttttgccagttacaagtgggatcagcacctggtgatggggcagaggcactgaaggatttagggatgagggagctcaacttgccctcctgtgtcctctgcgcagtgtgaaaatgctctctccttcaagactttaaatattaatgaattaaatgctccaatcaaaagccaaggcattagaatttgaaaatataaagatttcccatatttgtatgaaatacaagtgtcactggtaaactgagttctttctctagtttgtatgagtcacaaagaaagaatacctaatggaacaaaaaaaaaaggcaagcaggatttattttctggccagagaaggagaaggggtcagagtcagctcttgctccgaagatacttcctcctcctagagctgtgggaagctgggtaattttaagcagctagatatgggaaggggaagtttgtaatatgggtagaaaggaacttcagatgttcacaaatcataaacatgtctctttataccacacatgttcaaaaggccagccgggtgcagtggctcacgcctgtaatcccagcactttgggaggccgaggcgggtggatcacctgaggtcgggagtttgaaaccagcctgaccgacatggagaaaccccatctctactaaaaatacgaaattagccaggcatggtggtgcacgcctataatcccagctacttgggaggctgaggcaagagaatcgcttgaacccaggaggcaggggttgcagtgagcactccagcctgggcaacaagagcgaaactccatctcaaaacaaaacaatgggccgggcgcagtggcttacacctgtaatcctagcactttgggaggctgaggcaggcggatcacgaggtcaggagatcgagaccatcctgggtaacatagtgaaaccccgtctctactaaaacaataaaataaaataaaaattagctgggcgtggtggtgcatgcctgtaatcccagctactcaggaggctgaggcaggagaatcacttgaacccaggaggcagaagttgcagtgagctgagatcgtgtcactgcactccagcctggcgacaaagctagactccatctaaaaaaaaaaaaacacgacgagaaagctgccgtgactttcttctgtgggtggggattttcatcttacaataaggtatcagtgatctaaaccagcagttcctaacctttttggcacagggactagtttcttagaagataatttttccatgtactggagtggggatggttttggggtgattcaagtacattacattgattgtgcacttaaatattattacattgtaatatataatgatgtaattgtacagctcgccatactatagaatcagtgggagccctgagcttgttttcctgcaactagatggtcccttctgggggtggtgggagacagtgacagatcttccagaatctcataaggtgcatgcaacctggatcccttgtgtgcgcagctcacaatagggttcgtgctcctatgagaatctaatgctgcctctgatatgacagaaggcagagctcaggtagtaatgtgagtgatgggaagtggctgtaaatacaggtaaagctttgcttactcgcccgctgctcaccttctgctgtgtggcctagctcctaacaggccacagtctggtaccgatccatggcccagggattggggatccctgatctaaaggcaacaaggggtcactggttctggtttactctggttttgagcaggccttatcttattctgataattggcaaagggtcctgaagctcccaggccatctggagtcctagtaagctagcatacctaaagataaacagactaggaaaaaaaaatgttatccactttttcagaaaataattagcggctgggcatggtggctcacgcctgtaatcccagcaccttggcaggccgaggcaggtgaatcacgaggtcaggagttcaagatcagcctggccaacacggtgagaccccgtctctactaaaaatacaaaaattatctgggtgtggtggtgggcgcctgtaatcccagctactcgggaggctgaggcaggagagtcgcttcaacccggaaggcggaggttgcagtgagccaagaccgcaccattgcactccagcctgggcaacagagtgagaccccatctcaaaaaaaaaaaaaaagaaagaaaagaaagaaaagaaaaagaaaataattagccatttcagctgttttgctttctcagctatttttccaggactggcccagtaacaaaagtaccagatataaaagcatcatgaattggaagctggaacccatggctaaaaagaaagaagccaaacatcaagtgtaattcaatgaaacaaaatcctgaatcaacttgtgataattgtagtgtttcctgacaagacaaattggcaagtttgaaaaacaagaaaaaaaagatgtctgattataactaatgaatgatattcatgcctttaaaaattacacacacatgcacacacacactcacaatctattatcacaagactgttctctctctgaagaatcaaccatctttctgtaagatgcttcatcaacctttcacattaactgcctttggagtaatattatatacttactttttcctagacagttgtgaaaacagggtgcagtgggtcaaaggtggtgtcaggggtttatgttcagattttgcatatttttacaaattgcagcaattaactagttcattactgtgttgatttaaattcttacaaaagcttccagacaaaaataaacactcatataaccatgaggaaaaaattcagaatagaatggagtccagaaataaggccacacacctatgaccacctgatcttggacaaagctgacaaaatcaagcaatggggaaaagacttcctattcaataaatggttatggtttaactggctagccataggcagaagactgaagctggaccccttccttacaccatatacaaaaatcaactcaggatggataaagacttaaatgtaaaacctcaaactataaacaccctggaagaaaacctaggcaataccatcctgtacacaggaacaggcaaacatttcatggcaaagacaacaaaagcaattgcaacaaaagaaaacattgacaagtgggatctaattaaatttaagagcttctgtacagcaaaaggaactatcaacagagtaaacagacaacctacaaaataggaaaaacatcttcaaactatacatctgacaaaggtctaatatctaccacctataagaaacaaagaaatttacaagagaaaaacaaacaccaccattaaaaaatagtcaaaggacatgaatagacatttttccaaagaagacatacatgcagaggccgggggtggaggctcacacctgtaatcccagcactttgggaggccaaggtgggcggattacctgaggtcaggagtttgagaccagcctggccaacatggtgaaaccccatctctactaaaaatacaaaaaaattatccagacatggtggcgggcgcctgtaatcccagctacttgggaggctgaggcaggagaatcgcttgaacctaggaggtggaggttgcagtgagcccagatagcaccactgcactccagcctaggtgacaagagcaagactccatctccaaaaaaaaaaagagaaaaaagaaatacacttcaatcaatgcaatcatctagaggaatataaaagacaaatttttattaactgatttcatcaaaaaacactacctattcaactcatgaatttatgtgtcaagagaacttatttacagaattctctcaccttgatgtgtttttttctgaaagtaagatgtaggaatccatagtccagatccactttaagcaggaggcactgataaagacaatagagttacaccttttatgacaattctttgatgttccaaattttctggcacattttgcacgagtgaatttggatgtgagttttctttttttggagatggagtctcactctgtcgcccaggatagagtgcagtggcacgatctcaactcactgctacctctgcctctggggttcaagcaattcttctgcctcagcctcctgagtagatgggactataggcacatgccaccatgcccagctaatttttgtatttttagtagagacagggtttcaccatgttggccaggatggtcttgatctcctgacatcgtgatctgcccgccttggcctcccaaagtgctgggattacaggtgtcagccaccgcacccagccggatctgagttttctaaattacatttatagcatatctagccagtgtgagttatgataaggaatcgtcaatctaccaaagttgtattaatatgtatatccatggaggtgacacttacgtcaattgacacttacatcatttcatcaggaaacatagacagatgctgcacatgaaattagccctaggctggacgcagtgagtggctcacgcctgtaatcccagtactttgggaggccacagtgggtggattgcttgagttaaggagttggagaccagcctgggcaacatggcaaaaccccgcctttaccaaaaacaaaaaaaaattagccaggcatggtggcgcacacctatagtcccagctacttgggaggctgaggtgggaggatcgcttgagcccgggaggcagaggttgcagtgagctgtgatcccccaattacactccagcctgggtgacaaagtaagactctgtctttaaaaataaaagaaagaaaggcttttacctgagcgcaagatgggtcaccagctgtactggagacaccggttctcactcttgtcgcatctgttcaaaccagcatggtctgatccggaaatatggtctcaatatgtgccgccagtgtttctgtaagtatgcgaaggatgtaggtttcattaagttggactaaatgaccttccttcaaagggttatccaaagcacctacccaatgaaaaaccaggatagttctttgtatataaaataaacattttttaaaaaccttcaaaaaaaaaaaaagaaattagccctattcctcagaaatttatatatttttgcaagaaatgtgattttaattcaatagcatacagtacatgttattgtaaatgcagtatacatttactccataagtaggaaattcactccttcccaagttttaatggttttctaatacttttaaatgttttgtctttagtttcccaaccaaatatggctatcatctctaaacacaataattttttttccatcctagtttttatattgtttattgatttttgacaataagttttatagactactgtaatagtgagaggaatgaaatagaactattttatttatttatttttttttttgagacatggtctcactctgttgcccaggttggagtaaagtgttgcaatcatgactctatagccttgacctcctgggctcaagtaatcctcccgcctcagctacctgggtagttgggattacaggttaaaaacaccatgcctagttaattttaaaattttttctagagatggggtgtcactatgttgcccaggctggtcttgaattcctgggctcaagtcatcatcctgctttggccttccaaggtgctgggattacaggcatgagccactgtgcctggctatgtttccttttgttagcttatgatcctccttttcagtgggaagcctgtcacacaacagtttctcatcatgctgtgctctgaaacataccttaaccaagaatcctacatcaaggaaagctcatgtttaaaatgaaagacaaaacaaagtctttttcaagaataaaaacatacatattgagacgatttgttcctaccacaccagacctacaagaaagatgaaagaaagtccttatgtctgaaaccaaaggatggcaaaatccgcaagaaaagagagagagcaccattaaagatcattatatgaatataatatccagactaaatgtatatttcctcacctttcttctcctcatggatttacaaagcaactgtgtaaaataataactagttggtgaattcttgggcctagaacacataaaaatgtaatgtatgttttatattcacaaataacactgtaaaaacctgagttaactaaatgactaccaaggggaaagcaataattataagaaagtactgttggatgtgcaaccctaagagttgttacacatgaaacgaaacaccccagaaaggcaaacatataatagagctatacaggataaatatgtttttgtttttgtttttttttgagatggagttttgctcttctttcccaggctggagtgcaatgatgcgatctcagctcaccgcaacctctgcctcctgggttcaagcaattctcctgcctcagcctcccaagtagctgggattacaggcatgcgccatcaagcccagctaatttttgtatttttagtagagacggggtattaccatgttggtcaggctggtcccgaactcctgacctctgatgatccacccgcctcggcctccaaaagtgctgggattacaggcgtgagccaccgcgtctggtggataaatatgttttttacatcactggaatttatccataaatcactggaaaactgcccaattgtgatattatcatttacatgataaacattcgattaatcactacaaaatctcacaacaagtataacaaaaaatagatcatcccctacatcgcgaagacatattatgtgaaatcagaatttactgtccttccttagttaaacattgactctacatccattccataagatcatggccccaagatttcctgcattcatccaacttggaaatttccatgttatatcacttatttctttttctttttttttttttgagacgaagtcttgctcttgtcgcccaggctggagtgcaatggtgtgatctcagctcactgcaacctctgcctcccaggttaaagcaattctcctgcctcagcctctcgagtagctgggattacagacacctgccacgacgcccggctaatttttgaatttttagtagggatggggtttcaccatgttggtcaggctggtctcaaactcctgacctcaggcgatccgcccacctcagcctcccaaagtgctgggattacaggcatgagccaccgtgcctggcccaaactttttattagcatagatttgcagttaagttttgaaatccagaagttagagcctactaacctagttcttgtttttcaagactgttttgtctattcagaggcccttgagatgccaaatgtaaaaaatgaaaaaatggggaaaaatggttcctagaaataaatcaagaggtcaaaactataactaaaaggacagcagagagtaaaaagtgctattattcaatgagaagtaagaatcttagattcttagaaaaggggcatttaactttggaaagtaggctcagtaagaacaaactaagcattcgcacacaaaaacagaaaaacagaaagaaaatgaagttcctggaagtgttagagctgctcctataatggtgaaaatgatccttctggatcatgataaactgaatataaggaatgagaaagcattaagagtgtggctagaggacatgtcacagaaccacatctctattgatagtaaaatgatacatgaaaaaaattagcctctgtaagcaccacagtgagacagttgagaagagcgagaggaaggagtttcaggcccatgaaatctagctgggtcagctaggtaaagcactacagacacgagaacttaaggaccacaggagaattgccactgggtggtgacaaggtgggaggatctcttgagcccaggagttcaacaccagcctgggtaacagcaagactccatctctacaaaaaaatttaaaattagctgggtgtggtgatatgcacctgtagtcctagctactcaggagattgaggtaggaggactgcttgacctgaagagttgaggctgcagtgagctatgatcatgccactacactccagcctgggcaacagagcgagatcatgtctctttaaaaaaaaaaaacccaaggcgcggtgccccgtggctcatgctggtaattccagcactttgggaggccgaggcgggcagatcacgaggtcaggagatcgagaccatcctgcctaacatggtgaaaccccgtctctactaaaaatacaaaaaaaaattagccgggcatggtggcgggcgcctgtagtcccagctactcaggaggctgaggcaggagaatggcgtgaacctgggaggcggaggttgcagtgagccgagatcgcgccactgcaatgcagcctgggtgacagagcgacactccgtctcaaaaaaaaaaaaaaaaaaatcccaaaagagttaatgaaactcataaaaaacagactaccttccagagcaagtcctccatcataatgaattgggcatgttctgaaagatgatgcccaatagtcccttcatccaaaagagtgtgaaccagggcgcggtggctcacgcctgtaatctcagcactttgggaggccaagtcgggtagatacctgaggtcaggagttcaagaccagcctggccaacatggtgaaaccccatctctacaaaaatacaaaaattagccagacgtggtggcaggcgcctgtaatcccagctactcgggaggctgaggcggaagttgcagtgagccgagattgtgccattgcactccagcttgggtgacagagcaagactccatctcaaaaaacaaacaaacaaacagtgtcaagcaatccctggggttcaagaccaggaaagatcaccttactctggtgctatgtggcaatgcatcgggtcacaagaataagccagccttatctactgagcaaacaatcactagattctctaaaacaaaagcaaaactttgttgcctgtgtgccagcaagaacacaagaagacttgaatctaccaatgcttcattcctgaagtgaaaaactaccttgaagaaaagggaatgccactcaagagcctcctcataattgacaatgctcctggccatctctttatgctgataaaaaatgtggaggtgatgttcctgcctcctaaaactacatcactgctacaaccacttaatcaaggcatcaggaagattaaggtgactttcacctttctcacctgtaggcggattcatgttgtcttttaatttttttagagatggaatctatgttgctcaggctggtctcaaactcctgggctcaagagattctcttgccttggcctcccaaagcactgggattacaggggtaagccactgctcctggcccaaactcatgttgtcctgatgctacccatgactgtaccatagtggatttatggaaagagcttcacaactgcagatgccattgtgcatatgacagagggtgtagatgtcctaaaggtcaagacagccaaagcatgctggaagccattatggagtgtgggagtcaacgatttcagggtcttctcgggtattgatacggtaggcaggaatatcccaaatgttacaaggcaagttggtggggaagattatctctgactggactgaagacaatgttgaggaaagcatagaagagcatacagaaatccttactaacaaggaactcgaagatatgctgaaatcctctccagataaggacgatgatgatgccgaacacgtagaagaggttgtccagagatgtggacacttgaaaaatttgcagcagtttttggggcatctacagcctctgcaaggtgcaagtattaaagattaccatcctcaagtcagatccttccatggaagaaagcctccatttcacctgagggataacatgccaacaaacactgcaaggattttttgatgatttaaaggaaaagaagaaccggctttctacaacgctgtttctaactaaatatctgcaaatatgaagacagacccttcaatgcttacagatctttggccctcaaattgaacagatcctgacattagtactatttagcctcctccaagtgtcaacatctgcaatcagaacctggttcttccaacacaaatgattgtccagacatcctgtcaagattcaagttagcctgatgtctcactgcttatctattatgccacacatctagtcacctctacacgtaatattagtcaccatacagcaatcagcattatcataatcattatacttgggtaatcaagcaagaaggattagaattttggtattaacatgctcttgaagaaaattaaacaaaagcaatctgccagtgttgaacaacaacaacaaaaaaaactataatgttataggtgacatgtactatgcaggtaggcctgcaatggttgggtctgtccagaacatgtatagacttctatcatgattccctaaataatacaataaaacaactatttacatagtttttacaatgcatgaggtatttaatccagagatgacttagagtgtacagggagatgtgggtagataacatgcaaatatgtaattttataaaagaaacttggcatgtgtggatttaggtatgatcagggactgctggaattaatcccctgcatatgtcaggggaaaactgtatttgaaataaactgaaatcacttaagccttcaccacatggtttacattcatagagtttatttctttttctttttttttattttttttgagatggagtctcactctgttgccaggctggagtgcagtggcgccatctcagctcactgcaatctccgtctcctgtgttcgagccattcccctgcctcagcctccagagtagctgggactacaggtgcgcaccaccatgcctggctaagtttttgtattttagtagagacagggtttcaccatgttggccaggatggtcttgatctcctgacctcgtgatccgcccacctcggcctcccaaagtgttagggattacaggcatgagccaccgtgcccaagccatagagtttatttccaatgtgatttgtttaattttctcaggtaaaataaaattaatgaatgctttcccacattccacacatttatagagtatctttccaatgagtccttttgtgtctgtgcaaggagctgagagaactcaatgcttttccacattccttacattcacatagcttctttgcggtatgagttctttcatgtccttgaaggaaacgggaatgagtgaaggctttaccacattgtttaccttcataaggtttctctcgagtgtgaattctttcatgttgtagaaggcaagtgagccaagagaatgctttcctgcattccttacattcatacggcttctctccagtgtgaatcctttcatgttgctttaagtgaccaaaatgactgaaggcttttctacatgtttgacactcataaggtttttctgctgtatgatttttttatgaagagaaaggtactggaaacaaccaaatgctttcccacattatttacattcatatggcttctctcccatatgagttgtctcatgattttgaagggaataaagatcactaaaggctttcccacatttacatttatagattttctccctagtgtgagtcctttcatgtctttgaaatccaatgaaataaacaaaggctttcccacatatcttgcattttgtgaggtccatctccagtgtgcattgtcatgtgtcttcgaaagcttgagctatgagataacgctttcccacactgcttgcattcatagagtttcttctctccagtgtgagttctttcatgactttgcagtgtactggaacaatcaaagcctttcccacatatcttacatttatgaggtccatctctagtgtgccttatcatgtgtctttggaagcttcccagatgatcaaatgctttcccacattgcttacattcatggggtttctctgcactgtgagtggtttcacgtctttgaagggaagtggaagcactgaaggctttcccacattgtttacatgtacagagtttctctccagtgtgagttttttcatgtcttagacaagaactgtaatcagggaaggctttagaacactgcttacattcatacagtttctccccagtacgtgttctttcatgtcttagataagaactgtaaaaatgaaaggctttagaacactgcttacattcatatagtttctctccagagtgagttctttcatgcatacgaaataaactgggccagaaaaatgctttcccacacaacttacatttataaggtccatctccatgctgcactgccatgtgtctttgaaggtttcccaaagaattgaaggacttcctacattccttacaatcatatggtttgtgtcctgtgtgagaaattttgtgggtttgaaacgagtggcaataactgaaggttttccaaaattgtttacgtgtattacgcttctctccatattcctgatactcatgtggtttgtgcccagcatcaactctgatgtggcaatgaagggatgaaagacccgtgacgacttctccactcattgttttcacgtggacctactccaggaggcatgtgcttgttcacaacagtatctccaatctggctagatgtttctccacaatgactactgtctttactttcaccgaagcgctctaccatatcgcatctgtaaaaaatgggaagtatattactaaaggtttgtttataaatgattttatatgtattaataggtattagatgtactttttttttttttgagatggagtttcactcttgttgccctgactggagtgcaatggtgtgatcttggctcaccgcaacctccacctcccaggttcaagcaattgtcctgcctcagactcccaagtagctgggattacaggtatgtgccaccacgccaggctaattttgtatttttagtaaagacggagtttctccatgttggtcaggctggtctcgaactcctgacctcaggtgatctgcccaactcggcctcccagagtgctgggattacaggtgtgagccactgtgcccagcctagatgtacatttttaacattatcatgcaaagcacaggcttcaggtgacgcctgcttaaatgtgaatgcactgaatgttgtgcaagataacttgaccccaagtgctttctcaatgatgatattcgtatggggattctttttctttttttttttttgagacagagtctcgctctatcgcccaggctggagtgcagtgatgccatctctgctcactgcaacctctgtctcccaggttcaagcgattctcctgcctcagcctcccaagcagctgggactacaggcacacaccaccatgcccagctattttttgtatttttagtagaaacagggtttcaccatgttggccaggctggtctcaatctcttgacctcgtgatctgcccacctcagcctcccaaagtgctgggattacaggtgtgagccaccacgcctggccaaaggtttgtttataaatgattttacatgtattaataggtattagatgtacatttttaacattatcatgcaaagcacaggcttcatgtgaagcctgcttgaacgtgaatggactgaatgctatgcaaggtaactaaatggcaggtgctttcccaataataatattcatatggggattcttaacattgcttccatggaacttattatgcaaacacttgaatagctatgaaaccattaagtatatgcttttggagaaaattttctaagaataaataaatttaagctgggtttgttcattttctttgcttctttgtaaaatttcctatcatttgaagaatgactccagaggcatatctttctcttgtgattgcaaattaccttacatttatcctgtgactttcgtattgatcttccctgatctggtcttctcatttcattcctaaagggtagacccagaaaaaatttttacaaaattatagaaaaactgtaagatattatatatagtgcaatcatgcaggattcattcaccaaactacagtggactcttgtaaacagttttgaattgctcaagtccatttatatgcaaaatttcttcagtttctgctatccctgagatagcaagaccagtctctcttactcagcctactcaatgtgaagacaataaggatgagaacctttatgaacatctacttccacttaatgaatagtaactacagtttctcttccttatgatcttcgtatcaccattttgttttcttttcttttcttttctttttttttttttttgagacagagtctcgctctgtcacccaggctggagtacagtggtgcgatctgggctcactgcaaactccgcctaccaggttaaacgaattattgtgcctcagcctcccaagtagctgagattacaggcacgtgccaccatgcccagcttatttttttgtatttttagtagagatggggtttcgccatgttcgctgggctggtcttgaactcctggcctcaagtgatccgcctgcctcagcctcccaaatgctataggcatgagccaccgtgcctggcccatattgccattttctttctttagcttatgtcattgtgagaaatatataacatatatgacatacagtgtatgtattaatcaactgcttatgtgaccgataagggtgccagtgaacattaggttaaactgtggtggaaaaaagttatatcaggatgtacaattgcttggggggctgacacccctaaaccctgtgttattccatggtcaaccagaccccctttccatattccaaatcttcaacagcattgcacatcaagaagcaaatgtccctaattgactaagtggagatacgacatcatccttacctacacagtccaggttcctgatggtttcctgcatcacatcttcgtagagattcttctggcaaggacccagcaaagcccactcttcctgggtgaagttcacagccacatcctcaaaggcaactgagtcctgaaacatcccacatatgtagatgagggaagcagagactgacagtactgagaatctacacttacctcttaaatttccagggtgcgtggtttccttcttttttttttaggtggagtctcactctgtcgcccaggctggagtggagtggcgctatcttggctcactgcaagctccgcctcccgagttcacgccattctcctgcctcagcctctcgagtagctgggactacagggcctgccaccacgcccagctaattttttgtatttttagtagagacgggatttcaccatgttagccaggatggtctcgatctcctgaccttgtgatccacctgcctcagcctccaaaagtgctgggattacaggtgtgagccactgcacctggctagggtgtgtggtttctaagcgtgacatggtaaatccactttcattttctgtctacactcactgtctcccacatggcaattctgatgctacaattaaatgtttgctaaggcaacaattgaattgggacgggtctcctgttggtaagtgaagtcagtattattacatggaccttcatggctatttctacagtggatctgcagttcttatcaggacaaagtcctactctttattgtgcaaaagagttaacattagcagtcctgagactacatatcctcacaaatgcttgtttacaatgttggaccttttatggtgtctaggcactggatttagggagggtccccaccaatgtggctagtaaaagggactgagtgtacctaaactatttatgcaaaataataaggcatttgcttagttcctatattcctctgagaactggaattctatttcatgctcagcagaggaagtgcacctgatcagccactgctaggtttgaatgtctgtcccctccaaaacacatgttgaaagttaatctccaatgtgaaagtaataaaaggtggggctttaagaggtgattgggtcctgagggtttggacttcataaacagattaatccataatggctgagtgaataaatgggttatctcaggagtaacactgtggtcatgtcatgagaggaagaaaagatctgagctagaggctcaatcccctcactatgtgatactctgtgctacctagggactctgtagagtccccaccagcaggaaggttctcaccagattcccagccttgacctgagacttcacagtctccagaactgtaaaaactaagtatgatttcttatcaattgcccaggttcacttattctgttataagcaaaaaaaacaagagaaagacagtcatgaggaaacactctgagcactgagtctaatgaacacccctggtagattacatttcatattctttgttgcaacttgtgattagggggatctggcccagcctatgtgcgattacagtaagagaatatttggaagctggcaactggtttccactagatcaaatgcagtaaagtaggacaaaagactaataaaatatacttcacaatcccaagggaaaaatcttaaacttattattaggtaatgtcaaaagagaaggaaagaaacggtggattgcacatgttcttagaaataactcaaagtcatctcttatgaatatgtataatattccataaatccctaaagcagacctttagtagtcaacaaaaatgacattaccaaatctaagtcaaaaatgtctaaaaatgcttaaaacttctcattaaatgacagcattataaaaacagataaaggattcttaagttataatattcagcaccccataaaattaacagaaagataaagataaataaaaataaaagtgaaaatggaaggaaagccttgtggagtttctgtttgtcctaggcccaatccctccccacctcagtgccagtctctctctctctctatatatatacacacacacacacacacacatatacacatatacacacacatatatatacacatatatatacacatatatatacacatatacacacacacatatatatatatataattttttttttttttttttggagacagagtctcactctgtcgccgaggcgggagtgcagtggtgcgatctcggctcactgcaagcactgtctcccaggttcacgcaattctcctgcctcagcctccccagtagctgggactacaggcactcgccaccatgcccggctaattttttgtatttttagtagagatggggtttcactgtgttagccaggatggtctcgatctcctgccctcgtgatccacccgcctcggcctcccaaagtgctgggattacaggcatgacccaccatgcccagccattaacctcaattctttttttacatatattttactttgtttcagagacagggtctcgctctgtctccagcccaggctggagtgcagtggcatgacctagctcactgcagcctcgaactcctgggctcaagtaatctggtgatctcagcatccctagtagctatgactacaggcatataccaccaagcctagctaaattttccttttttcttttttttttttttttttttttgcatagatgaggtctcaccatgttgctcagactcgtcttgaaatccaggccttggttgggcatggtggcacacacctgaagtcccagctacttgggaggctgaggcaggaggatctgttgagcctaggagttggagatggcaatgagctataatcacaccactgtactccagcctgggcaacaaattgagacccccatttccaggaaggaagggaaaggagaggagggcaggggaggaagaagagaagagaacggaagggaaaggggaaggggaagggaaaggggaagggaaaggggaaggggaaggggaaggggaaggggaaggggaagaaggaaaatccaagcctcaagcaatcctcccaccttggccattcaaagtgctgccataacaggcatgagcgaccatgcacattccactttcatttttgaggatccactctcataatctaacctaatccttatcatgtctcaaaaaaaccattgcctaatactgccacatcagggaagtggaaaaataaataaaattttataaggacataaacatttattccacaataagtgatttattagtagctttttatcattttctaaatactcatgttaatcccttatcagatatataatttggaaatggtttctcccattctatgggttactcatttactctgttaatattgcattttgatgccaaaggtccacaaactccaaattatttttttcccttgtgggtcatgcttttggtgccaaatctaggaaatcactgccaaattcactgtaatacagcttttgccatgtattttcatctaacagttatacagctaagatggacactcacgtatttcattcattttaacttctgtacatgttaggtatgggtacaacgtcatcctgttgcatgtggatgtgcattgcccaacagcatcattctacagaaacactaagctatcccccatcgaatagtcacagcagacttttcagaaattgttagactttatgtaaattattagactttattagactttctgtgttatcttgttgcattgtctatttctgcgttattacgctagtaccaaacagtttttattagtatggatttgtaataagttttgaaatcaggaagtgtgagttcaccaactttgttctggctttttctttttttttttttttttgagacagagtctcgccctgttgcccaggctggagtgcagtggcatgatctcagctcactgcaacctccacctctcaggctcaagtgattcccctgcctcagcctcctgagtagctgggattacaggtatgcgccaccatgcccgattaatttttgtatttttagtagagatgcaatttcaccatgttggtcaggctagtctccaactgctgacctcgtgatccgcctgcctcagcctcccaaagcggcgggattacagaagtgaggcacatctggccattgttctggcttttgaagactgttttgttcattcagagacccttgagatgtcatatgtaaaaaaataaaaaatgttaaaaaatggctcctaagaaggaatcaagtggtcaaacctatccctaaaaggctagcagtggttaaaaagtggtatctctcaataagaaaatacaaacccaagatgttttgaaaagtggtgtatcaccttgaaaatttcatcataaagtaagaacaaaccaagaaaccacacactaaaactgagagaagctgaagttcttgaaggtgttagagcttttgccaccgtagggtggcaaaaatgatccctctggtttatgataaactaaggataaagactaagaaagcattaagtatgtggctagaggacatgtcacagaaccacatccctgctgatggtaacatcatacttgaaaaaacacttagccgggccaagcgcagtggctcactcctgtaatcccagcactttgggaggccaaggcgggtggatcacgaggtcaggagttcgagatcagcctgaccaacatggtgaaacccagtctctactcaaaagacagctgggtgtggtggcgcgcacatgtaatcccagctactcagaaggctgaggcaggagaatcacttgaacccgggaggtgggggttgcagtgagccaagatcacgccactgtactccagcctgggcgacagagcaacactccgtctcaaaaaaaaaaaaaaaaagaaagaaagaaaacaaacaaacaaaaaaacatttagcctctatgagcatcactgtgagggggctgaggagagcaagaggaaggagtttgaagccagtaagttctggctaggctaactatgcaacacagtgcagcccaagaacttgaagaccacaggagaactggcatcggctgaagccacggaaacaacagcattcctagaagagctcataaaacagaaaaaagaaagactatcttccagagtaaatcttctattgtcatgaatcaggcatgttctagaagatgcccaatggtaccttccgtcatgagtgcaggaactagggttcgaggcctggaaagaccaccttattctggtgctgtcaggccatgcattagttcatgagaacaagcgaggcttcatctactgagcaatcaccaggttctttaggacaaaagcaaaacttgctggcctgtgtcctggcaagaacataagaaggctttcttctagcaatgcttcactcctgatgtgatggaatacctcaaagagaagggactgccactcaaggtcttcctcagaattgacaacactccaggccatctctccaatctctttgttttgcctaaaagaacatgcaagtgatatttctgcctcctaaaactacatcactgctgcgtcactagatcaaggcatcatcaagtgcattcaagtgacttacatccacctgaccttggctgatttcttggagtcttgatgctaaccttgaatgtaccacagtggttttattgaagagcttcacaattacaaatacaattgtgcttattgggaaggctacagatgccctaaagcccaggacagccaatgcatgttacaagccatcatggggtaagggagtcaatgatttcaagggcttccccactattaatgcagttattaagaatatgtaaaatgttgctaaaaaagttgatggagaacgctgtctgaaacgactgaggatgacgttaaggaacacaccgaaaagcaaagagaaacccttaccagctaggaacttcaaagtctgctgaaatccactacagatgatgatgagctagaaaacttagaggacacagagccattgatttggacacttgaaaagtttgccacagtttttcagtaggcaaaggtgaaaaagaggtacgatcctcaaagatcctacaatggaacaaagctttcactccacccgagaaataacaacatgcctataaacactgcaagattttttttttaatgaagcaaaggaaaagaagaactagcttcctataactaagcatctgcaaagaagatggaacattcaatggttacagatcttcagccctcaagccaaacagatcctaacattagtattacatagcctcctcaaatgagtccacatctataatcacaagttggttcttccaacatagatgatagtcctgatggcctgtcaagattcaagttaacctgatgtctcactacttacccacaatgccatacatctagtcatctcaacacatcaaaacactgggcaccacagaatcatcatcgttataatcactatacttgggttatcaagagagaagacccagggttttggtaagtgttaacacattaaacaaaagcaatatgtgagagttgaaacaaagaaactttaatgttctggctgactatactatgttgataggctgacaattactgcatctatactgaaaatacatagactcttttccttatcatgagtccctaaacaatacaatagaacaactatttgcatagcttttacaatgcatgaggtattttaagtaatctagacataattgagagtatacaagaggatgtgggtaagttacatacaaatatgtcattttataaaagggactggacatggctcacggagtgctggaaccaatacccagcaggtatcaagggatgactgtactggaaagaaactgaaattacttaaggttttaccaagtgcttacattcacagggtctatctccaatgtgtttcgtacaagtatctgaaatgaaataaaattaataaatgctttcccacattccatacatttagagagaatgctagtgagtctttttatgtctatgcaaggaactgagagaagcaaatgctttcccacattccttacatccatacgggttctctccagtgtgagtttttttccagtgagtctttttatgtctatgcaaggaactgagagaagcaaatgctttcccacattccttacattcatacgggttctctccagtatgagttttttcatgtccttgaagaaaacgggaatgagtgaaggctttaccacattgttgacactcatagggtttctctctcatgtgaattctttcatgtcgtagaaagcaagtgagccaagagaatgctttcccacattccttacattcatacggcttctctccagagtgaattctttcatgtacttttaagttaccaaaatgactgaaggctttcttacatgtgttacactcataaggtttctctcctgtgtgagtccttctatgttgagaaaggtattggaaacaactgaatgctttcccacattccttacactcatatggcttctctccagcatgagttgttttgtgattttgaaaggaatagaaatcaataaaggctttcccacatttgcatttatagggtttctctccagtatgagttgtttcatgccttcgaagagaactggaaatacggtaggctttgccacattgtttacatttatagggtttctctgcagtgtgagtcttttcatgcctttgaaatacactgggataaacaaaggctttcccacatatcttgcatttgtgaggtccatctccagtgtgcattgtcatgtgtcttcgaaagcttgagctatgagataacgctttcccacactgcttgcattcatagagtttctctccagtgtgagttctttcatgacttttcagtgaactaggacaatcaaagccttttccacatatcttacacttatgaggtccatctctcgtgtgcattaccatgtgtctttgaaagcttcccagatgatgaaacgctttcccacattgctgacatgcatagggtttctcatcagtgtgagttgtttcgtgtcttcgaagggaagtggaagcactgaaggctttcccacattgtttacatgtatagggtttctttccagtgtgagttctttcatgtcttagacaagaactgtaatcagggaaggctttagaacactgtttacattcatacagtttctccccagtatgtgttctttcatgtcttagataggaactgtaaaaagaaaaggctttagaacactgcttacattcatatggtttctctccagtgtgcgttctctcatgcatatgtaataaactgggccaaaaaaacgctttcccacacaacttacatttataaggtccatctccacgctgcactgccatgtgtctttgaaggtttcccaaagaactgaaggacttcccacattctttacaattatatggtttctttccagtgtgaagcctctcatgtgtttgaagtgagttgtggtaactgaaggctttcccacgttgtttatgcgtatctggcttctctccacattcatgatactcatatggtttgtgcccagcaccaactctgatgtaacaattaagggatgaatgacccatgatgacttctccactcatacggctttcatatggacctactccaggaagagtgttcttggtcacaatactatcttgaatctggctagatgtttctccacattgagttccatctttactttcaacaaatctctctaacatacgacatctgtaaaaaatgggaaatatatcactaaaagtcggtctataaataattgtataggtattaataagtattggatgtacatttttaacactatcatgcaaagtgcaggcttcgtgtcctgcttgaacgtgaatggatggaatgctgtgcaaggtaactcgacccaggtgttctcaagacaatcacattcatatgtggattcataatattgttgtcatgggaactaatttatgaacactgaacagctatggaacatttaagtatatattttggagaaaattttctaagaataaataaatttaagctaggcttgttcattttctttgcttgtttttaaattttcatatcattctcagaacggctccagggacatatctttctcttgtgagtataaattaccttagatttttcctgggatatctatattgatcttcaatgttctggtctttccatttcattcctaaaaggtatacacagaaaaatcattacaaatttttacaaaattatagacaaacagtaacattttgatgtacactgcaatcgttcaaaatgcattcactgaagtacacctgactcttgaaaaacagaggtttgaactgcacaagtccatttgtatatacatatatatatgaatgttcttcagtctctgctacccaagacactaagaccagcccctcctcttactcagcctactcaatgtgaagacaatgagaatgaaaacctttctgatgatgcacttccacttaatgaacagtaaatacagtttctcttccttatgattatctttttaacactttctgtttctagcttactttactgtgagaatatacgatgtaataatacgacataaaatatatgtattaatcactgcttatgtgactgataatgctgcccatcaatagtaggctaagatgtggacaaaaagttatatgaggatgtacaactgctacaggagctggcacccctaaaccctgtttttttttttccagggccaaccatatcccctttccatattccaaatctttgaacagcacgaatgaccaagaaacaaatgtctccaattaaataagtggaaatgcgatgtcatccttacctacacaatccaggttcctgatggtttcctgcatcacatctttgtagagattcttctgacaaggacccagcaaagcccactcttctcgggtgaagttcacagccacatcctctaaagccactgaggcctgatccatcccacatgtacagaggaggaagggtgaaaatcacagtactgagaatctatactcacttcataaatttcacatgatgctgtggtttccaaccattttattcaatgacatggtaaacccactcttattctctgtctacactcactttctcctacacagtaactctgaagctacagttaaacatgtttggtaaattaacagtgggatagaaacatgccacttgttggcgaactgagtgagtgaatcacatagcctggatcacccctaatgttgatttccacagtgggtctgcagtccttggcacgataaagtcctactacttattgtgcaaaagggagttaccattagcagtgctgagactgtgtgtccttacaaatgctttttcacaaagttgggcttttcatggtatctagacagtgtatttaggggagggccccaggagcgtaactaataataggggtggagtgtgcctaaattgtttacgcaaaaaaaatacagtatttccttaaccccatcttccttctgagagtttggaattttgttacatactcagcacagggagtgcacctgatcagccactgctaggtttgaatggttgtcccctccaaaatgcacactgaatgttaatctccaaagtggcagtaaaaaaaaaaaagtgaggtttaagaggtgatgtagtcctaagggtttggacctcatgaatagattaatccgtaacgggtgaatgaataaatgagctatctcatgtccttctgagaagagtaagagatctgagctagacactcagctccctcaccatgtgatactctatgccgcctagggactctgcagagtccccaccagcaagaaggttctcaccagatgcccagccttaaccttggacttcccagcctccagaaatgtaaaaattaaatactgtttcttataaattaccgaggttcagtaattctgttatgaataacaagaaacaggctaagacagctacaaagaaacactctgggcattgggtctataatgaactttctgggtagataacatttcacgttttgttgcaacttgttatttgggggatttagcccatcctatgtgattatacttacagagaatatttggaagctggcaactagtttcctttagatcaaatgtactgaagtatgacaacagactgagaaaagatattacaccacctcaaaggaaaaattttaaacattttgagtaacgccaaaggggaaagaaagaaggggaaagactgcacatattcttagaaagaactcagtgtcatctctcatgaatatttataatacttactaagaaactaaaacaaatcttttagtagtcaacaaaaattacattaccaaatctaatagaactcacagtatctaaaaaatgctgaaagccttctcaccaagaaagtgcagcattccaaaaacaaataaaggattttatttggcaccccgtactattaacagagagataaatatatatataaagaaaaatgaaaactggtagaaaagtcttgtggagcttttatttgtccttggcccaatccctccccctatcaataccagtcttgaacacagcagcctgagttcccggtatagaaccctggacactaattctagagacagcatatcagatcttatttgcaaattattgccttgcattttccaatctgtataaggactatcccgaggtctgaaacaaagctgtctttttttttttttttttttgagacggagtcttgctctgtcacccagactggagtgcagccacacaaccttggctcactacaacctgactcccgggttcaagttattccacccagcctcagcctcctgagtagctgggagtacaggcatgctccaccacatccggccaacttttgtatttttactagagacggggtttcaccctgttggccaggctggtctcaaactcctgacctcaaatgatccgcctgccttagcctcccaaagtgctaggattacaggtgtgagccacagtgcccagccaaggccctctcttctactttatctacaatacaacacgatcagggtccaatttggcaggaactgcatgaaaatgttgcaaaatacacaaaaagcctgtagccaactggaagaacagactatgattaagacatacagtagaccaactaagtcatggagaaaaagagctgaagagaaaatgtcctccagatatcagggtactcaaaagcacccaggtatcctggggaattgagaaagccccatgcatgcacagtaaagaacacattttcacaaaagacaccggagaagaaaccctcattttcacttctggctgatctgtagctttaagtaagcagaacataaagcataagtagagtattaaacagcctggctaagtgttcaagggatgccccaggcacagagccatccacaaagactggaagaggtcaggcttttgtatgctttatcttttttactagcttctagcattcaggaaatctctgccagaacactggatgaacacacactaaagaacagagatgtcagtttctacaacaaataaggaatacagtctgtgcaaacatactttgaaaatgttattaaacaaatgaacaattacagtcttcaacacacataaacagaaaacagtgaggaaagaagaagaatccaattttcagaattaccccattataacattgagatgtctacttttcaacacaaaattatgaagaatacagaaaaacatgaaaatatggttcatcaattggaaaaaatataattgagataagccatctctgagaaacctcagacactgcactcactgaataaaaacgttaaaacaactatcttaaatatgttcaatgaagtaaaggcaatgatgaacaaataactaaaagaaaaccagaatacagatatagagataaaataatatctattaaaaagtagaaattaactgggcgtggtggctcacgcctgtaatcccagcactttgggaggccaaggtgtgtggatcacctgaggccaggagtttgagaccagcctggccaatgtggtgaaaccctatctctactaaacatacaaaattagctgggcatggtggtgcacgcctgtaatcccagctacttgggaggctgaggcagaagaatcgcttgaacccaggacgtggaggttgcagtgagctgagatcatgccactgcacttcagcctgggcaacaagagcgaacctctgtctcaaaaaaaaaggggtagaaatttagccatatagaatttatgcagctgcagggtacaactaaaatgaagacatcatcacaagtgttcaaaagatgtgagcagccaaaaaaaaaaaatcagttaaaatgatgataaaccaattgaaattaatctaatggggaaaaaaaaaggaatgaaattgagagaatgtgttactggtgtacttgtcttgccaataatgttaaaagaagttcatcagagagaagaaaaatgatacaggttagaaactcagatcatacacacacacacacaaacacacaaatatatacatatgcatatatatgaagagcattagaaaataattcaatgaaggcacaaaaattatttccttttcttattcctattggatatcataaaggtttgttcaaaaaataatatcaacaatgtattgggtggttatagtttataatagggcaaatggatgacggtgatgttaaattgggtgggagggaggaatgctgaacactgggttatataagcattaccccaaaagccagtacagtgttacttaaaactgaaggtccatttgttgtgaatggtttactccaaatgctagggaaatcaataataaaatgttaagaaacaacagcctgtcacagtggctcacccctgtaatgccaacactttgagatgcaagacaggaggactgcttaagatcaagactttgagtccacactcggcaacacaatgagactctgtctctaggaaacgtgtaaaaaaaaaaaaaaattagccaggcgtggtggcctgcacctgtagtcccagctactcaggaaagcaagtagggaggatctcctgagcccaggagttggaggttatagttaactatgattgctccactgcactctagcctaggtgatagagcaagaccctgtctcaaaaaaaaaaaaaaaaagaaagaaagaaagaaacaaagaaacaagtagacttaccatactattagaagaaaatacaatcatatagactcctcagttaaaataaaaggagacagaaaaaggaagttgaaaaaaaccgacaagtataacaaatgtaaaacaattatatatgtacatatgaatccaggtatatcaataaccactttaaatgtgtattatatgaatataccaataaaagaagacaaggactgacacagtagaaaaaaaacaagatccaccaatgtgtgcaagaaaactatttttttattctctcaagaaaactattttaagtagaaagacacaggtacattaaatataaaggtatgaaaaaatatactccattctagccctaatcaaaagccatatggggctgggcatggtggctcatgcctataatcccagcactttaggaggccaaagctggtggattgcctgaggtcaggagttggagaccagcctggccaatatggcgaaactgtctccactaaaaatacgaaagaaaaaaaaaattagccaggcatggcggcacgcacctgtagtcccagctactcgggaggctgaggcaggagaatcgcttgaacgcaggaggcggaggttgcagtgagctgagatcgtgccactgcactccagcctggacaacagagtgagacgctgtctcaaaaaaaaaaaaaaaaaaaaaaaattggtcttagctggaggtgggggcattggcctcaggcctctctgccatagtcaaagctactctcttacccttctatgctttacatggatatttaaaaacaaaatactcatgtttgatgaatccaggaaaatcactcaaattcagtgtttatgtctatgggtgggaaggaaattgtaaggcactgatattttatacctcaacaggaaaagcccaaatacctatcccttccagacaatgaatgtcatttaattactatttccatgatagtaagtgatacagttaaaaataattatattttacttctttagctgttggaaagtcctgtcccacagaatttagcattcatctgtcaaacccatataacaggaacagaacagatttctccattgtcccaaaatctccacccttttaaaaaggagaactgaacttttgttaaatccttttaattcaatgtacctactacactttcttgtaaaaatgtattccttttttgcagccataatggaagagggttttttccttggtagtagttatactactaagtcctgaaattccatctgaaatcatccaaaaaacaaacacacctgagaaacatactacacaagctctggggcaaaaaaaataaataaaggtttttaaaaaatggaatagaagattacatataccatttatattctgaaatccaactctttctagaattacttatacaatttattttctgaagtccaactctttccaactttgggtatactttgtcttcaaagtatacaataacaatctctaatcataggatgtattttaaggttaatcaaaaatttaggctgaaaagagtaaacatatcttttcaagctaacaaactcaggaatcagcagtgctgactggaacacagaaaagtctaatgcaacaatcagggtgggtcatcctatcacctgggacatcccttaaccctattctggtcatcaccctcccaggagacactgccttgtgtgcttttcaggatcttgcactacctcaacgggcaggttctccagtccttagatataactttctaccttttaagtctgagagagtccagaaggcaaaaatcatttctgtttttttttcctatggaatatgaccatgaaattggctgttcagtcatgtgtctccaaggaatggaaactagggttgggaagaaaaggtgagtgtcccaggagttagctttttacaggaattatataccagaagattcctcccatcccagtggatccagttgctccccagggggccacaccccccatctcaggctgtcccctgggaggagtgacccaggggatgatattcactagaccctccaagagacttggcagctgtggacacccttttttttttttttttttgagacagggtcggcctctgttgcctaggctgggatgcagaggcacgatcatagctcactgcaacttcaaactcctgggctccagccatcatcccacctcagcctcaggagtagctgcgactacaggtgccagctaccaagcccagctaattttattattatcatttatactagagacaaggtcttgccatgttgcccaggctggtctggaactactaagattaagcaatacctctgccttagcctcccaaggtgctggaattacaggaatgacccaccgtgttcaggaacccaaaataattctttcaagaaaaagccatacattgctagctgaaaacaagatgacaaactagtgaaatatcgcctgggggccaaacagttcataccgttgctgtgaattaaggacagaaggttagcctggggaagtctctggaaaccaagagatttgctgccagccctaggaggagtcaggatgagagaacacagtggtggatttgagaccctgctaaccacatctttggaagactcagaggggaaacggtcgcccttggaaagaaagaagggactgaggaccacggagaccacagctcctcccacacacaaaccccacacacgagtctggattccacctggtgactcgtcgtcaccgtgcagcctcctcaccgggttcacaggaactgcgagccaggctggaggcgagattgcagttagatattaaccaggtgccctcagccccgctgcctcaaggggccgcctccctgagagtcaggtcacagcagacgctgaccgccggcttccccattgtgcctggggataagatctctgagaactgctcaagagtcgccggagttctcagatcctgaatcccagcaaaggctggcgccaatcaggttgaagtcccaacgagggagcccattcagcagaatgcggtttcttcacctcctgtcccaggattcacccctcacttccccaccaaccaacgaccctacacccagccgcccccgtccagaccccaaatccctcagggaggcggatctggggtgtcctcccctctctggctattaaactgtttctgctgcagccctcagcgtctcggtgcagtgagtcgggccgcgaacctgtgttgcttacagccgcacaatctcgggagacgcgaggctgcgggcgcggagctgcccagagagggcgccggggccgcagtcgccgcgcaggaacgggacaggacgcccggggtcccggctgcatgcccagccccaccctgcggccgagggccgacctacgccaggggaacccgggtccgtagatcccggagtagcccttggggaggcccgggtccagccacagccgattactgcaggttccacccagcccctcccccgcctcgggacgccggcccagcacacgcaccatttcccgacttccgcggtgtcccaggtcctccggacggctcccgctgccaatgcgggttcccgcgggacacaggctgccacggaacttccaggtcgtctcttagctacagagccgagcaccgagcgcccagcgcaggtgggtggagaagacgccgcgggctttttcaaccacacactcctctgggaagcgcgcctgattgacagttcccacgaacccgccccacggcccttactggatacggcgtcaggtgccgcccctcgtggactgattgacagaagaagcgatcttgcacagctgagtggagccagatgagcaagttcctgacacagcccttggcagggcgggcttcctccctgctctttgatctgaatcctcccgagggatatttgcacttaagcggaatttcctgcctgtactcaataggacctcctgcttcttcctcctgtacactgactgacaaaacaattatacttttttttttttttttttttttttttccgagagagagagagagagagagagagagagagggagtcttgctccgtggctcaggctagagtgcaatggtgcgaggctcactgcgacctccgcctcctaggtgggttcaaacaattctgcctcagcctcccgagtagctgggattacaggtgcgcgccaccacacccggctaatttttgtatgttttagtagaggccgggtttcaccatgttggccaggctggtctcgaactcctgacctcgtgatccgcccaccttggcctcccaaagttctgggattagagacgtgagccatcgcgcctggctccaattatactctttttcaatgaaatttttcaaaatatttcaatgtacaattaaattattttttactatagtcactctgttgtgctagcaaatactaggtcttattcattctttgtaactattttttatacctattaaccatccccacttcccccataactactcctcgctactacttttcccagcctgtggtaaccatccttctacacgtttttggttgtttgagatggggtcttgctctgttgcctaggctggagtgcagtggggccatcatggctcactgcaacctctacctcccaagctcaagcaatcctcccacctcagcctctcaagtagcttcagattgttcactgttggcatataaaaatgttactgatttttgtatgttaatattgtatcctgcaactttactgaatttatttctcagttctaatacttttttggtggagtctttaggtatttccagatataagatcatattatatgcaaaccaggataatttgacttcttcctttccttcccaatatagatgccctttatttctttttttttttttttttggacttattgctctagctgggacttcgagtactgtgctgaacaacagtggtaaaagtgggcattcttattgtgttccagatcttacaggaaaggctttcagtttttcctcattcattatcatgctagctgtgggtctgccatatatggcttttattatgttaaggtagctgcttctatacccagtttttttttagggtttttatcatgaagggatgttaaatattatcaaaagctttttcagtgcacattgaaatgattatatggtgtttgccctttattctgttgaaatgatacatcacattgattgatttgcatatattgaaccatccttgcatcccagggataaagcccacttggtcatgatgaatgatctttttggtgtattgttaaattcagtttgctagtattgagttgaggatttttgcatcaatattcatcagtgacactggcctatagttttctttttctgacatgtctttgtctggttttggtgtcaaagtaatattggctttgtaaaataagtttggaagtattgccttctcctctgttttggaatagtttgagtaggattggtattagttcttttttaaatgttagtagaattcagcagtgaagccactgggttctggggttttctttgctagcagactttttattatggctttgatctcattatttgttattggtctgttcaggttttttatttcttcatggttcaatgttgctatgttctatctgcctaggaatttatcaatttcttctaggttttccaatttattggcatatagttgttcttagttgcattaatgatcctttgaatttctgcagtatcaactgtaatgtctcctttttcatctctaattttatttatttgggcctttctgtttttttcttagtctacctcaaggtttgtcagttttgtttgtcttttcaaaaaaccaactttttgtttcattgttcttttctattgtttcttcatttcaaattcatttatttctactctgatttttattatttcttttctactaattttgggtttggtttgctcttgcttttctaattctttaaaatgcattcttaggttgtttatttgaaggttttcttcttcttcttcttcttctttttttttttgatgtgagttttacttcactcttgcagcctaggctggagtgcaatggcgcaatctcagctcactgccacctctgcctcctgggttcaagcaattctcctgcctcagcctcccaggtagctgagattacaggcacccaccaccatgtctggttaattttttgtatttttagtagacagggttccaccatgttggccaggctggtcttgaactcctaagctcaggtgatccactcacctcggcctcccaaagtgctgggattacaggtgggagccaccgcacccagcctgcaggtcttcttcttttttgatgtaggtgcttatatctataaacttccctcttagtactgcttttgctgtattccataggttttggtatgttgcattttcattatcatttgtttcaagcaactttacaatttccttcttaatttctccactgaccaattggtcattcagaagcagattatttaatttccatatgtttgtatggtttccagaattcctcttgtcattgatttctagtttattccatgtattctatgacacaatttaaattatttcaatttttttggagagttttaagacatgctttttgaactaacatatggtctatccttgagaatgatgcatgtgctcgggaaaaatatgtgtattctgtagctgttggataaaatgttctgtaaatatctattagatccatttgatctatagtgtagattaaatcccatttaatctttcttttgtctgatttttcagtatatattgagataatctttgtcgatttactgtctggaagatctgtcctgtgctgaaaacggggtgttaaaatctccagctattattgtattggtctctctctcttttatttttatttttatttttttttgagacagagtttcactcttgttgcccacgctggagcgcaatgttgcaatcttggcttactgtagcctcctccacctcccaggttcaagcagttctcctgcctgctgggattacaggcgtgagccaccatgcccggccctcagtgccagtcttaaagacagcagcccgagatcccagtataaaatcctactcactcaattatcacctttgtattttcgaattggtatggggactttccaaaggtctgaaacaaggctctctgttctatatcatctacaataactcagtccctgtcaaatttggcaggaattgcctaaaaatgttgtaaaatacatcaaaagcctgcaaccacctggtaaaacggattatgattatgacataccatctctgatggttaatactgagtgtcaacttgattggattgaaggatacaaagtattgatcctgggtgcctctgtgagggtgctgccaaaagagattaacatttgagtccctgggctggggaagacagatccaccattaatctggtgggcacaatctaatcagctgccagcgaatataaagcaggcagaaaaacatgaaaaggagagactggcctagcctcccagcctacatctttctcccatgctggatgcttcctgccctcgaacatcagactccaagttcttcagttttggggcttggactggctctccttgctcctcagtttgcagacagcctattgtgggaccttgtgattgtctaagttaatatttaataaactcccatttatatatatatatatatcctattagttctgtccctccagagaaccctgactaatacaccatctaaatcctgggggaaaaaagttggagagaaaatttcctctagtaaactagggtactcaaaagcactcaggtatactggggaattgagaaagccccatgcatgcacaggaaagaacacattttcacaaaacacatgataaaaccctaattttcagctctggctgatccctaggtttaattaaacagaaaataaatgctaaagtaggattttaaacagcctgactgtgttttcaaggaatgccccagtacagagccatccacaaagactgaaagaggtaaggtttttgtttgtttcatcttcttctttacttttagcttctaacattccagaaatctgtcagaacactgaatgaacacagaggaatagacatcagtgtctacaatgaatagggactacagtctctgcaaacacagtttgaaaatgttactaaacaaattacagccttcaacaaacataaatagcaaagagtaagcataattttgttttgatacaaacaaaattatgaagaatacagagaaacatgaaaatgtggctcattgatggaaaaagtttaattgacatagttcatctctgagaaacctgacactggacttactgaattaaaactttagagccgagcgcgatggctcatacctgtaatcccagcactttgggaggccgaggggggcagatcacaaggtcaagcgattgagatcatcctggccaacacggtgaaaccccatctctactaaaaatacaaaaattagctgggtgtagtggcatgcgcctgtatacccagctactcgggaggctgaggcagaatcgcttgaacccgggaagcggaggttgcagtgagccaagattacgccactgcactaatgtctggtgacagagttggactctgtctcaaaaaaaaaaaaaaaaagaaaaaaaaaaaggcccggcgcggtggctcacgcctgtaatcccagaactttgggaagccgaggcaggcggatcacgaggtcaggaaatcgagaccattctggctaacacggtgaaaccccatctctactaaaaatacaaaaaaaaaaaatagccgggcatggtggcaggcgcctgtagtcccagctacttgggaggctgaggcaggagaatggcgtgaacctgggaggcggagcttgcagtgagccgagatcgcgccactggactccagcctgggcaacagagtgagactccgtctcaaaaaaaaaaaaccaaaaaactttaaaataaccgtctcaaatatgttcaacaaggtaaaagcaatgatgaataaagaactaaaagaaaaccagaaaacagatgtagggataaaataatattaattaaaaagtagaggcctggcgcggtggctcatgcctgtaatcccagtactttgggaggccaaagtgggcgaatcacgaggtcaggagatcgagaccatcctggctagcatgatgaaaccccgtctctactaaaaatacaaaaaattagctggacatggtggcgggcgcctgtagtcccagctactggggaggctgaggcaggagaatggcgtgaaccccggaggcggagcttgcagtgagcggagatcgcgtcactgcactccagcctgggcgacaaagcgagacttcttctcaaaaaaaataaaattaaattaaaaaagtagatattgagccatatagcatttatgcaggtgcaagatacgacaactaaaatgaaaacatcactacaggtgttcaacagttgtgactaactaaagaaaaacatctaaaatgaagacaaaacaactaaaattacccagtctgagagaggaaaaaaggaacaaggatgagagaatgtgtgactggtatacctgccttgccagtaatgtcaaaagaagttcatcagagtgaagaaaaaggatacaagttagaaatttgggctggctcagtggctcatgcctataattccggcactttggaagacccaaatggtaggattgctggagcccaggagttcaaggccagcctgggcaacatggtgaaactccatctctataaaaaataaaaaattagccaggcatggtggtgcacatctgtgatacaggctacttggaaggctaagacaggaggttaacttcagcccaggagatggaggctgcagttagctatattcctgtcactgcactccagcctgagtaacaaagcaagaccctatctaaaaaaaaaaagagagagagagagaaaaaaaaagaactagaacaaattctggtcacacacacacaaacatatatacacaaatacatacaaacatacatatgcaaactacataaaatatatgaaaagaattaaatgaaggcacaagaaaactctttccttttctagttcctatctgatgtaatagatgtttgttcaaactaataatatcaacaatgtattgggtagtttagcttataatagggccaatgaatgacagtgatgttatctgggatacgagggaggaatttggaacactctgttatacaggcactataccagaagccagtatgatgctttgtaaaactaaaggtccattcattgtgaatggaatactcaaactctagggaatttactggtaaaatttaagaaacaatagctagttgggtagctcatgtgtgtaatcccaggacctttaggaggccaaggtgggaggattacttgagcccagaagttcaagaccagcatcagcaacatagtgaaaccctgtctctataaaaattttaaaaatatcttgggcatggtggcacaaactgtagtcacagctactcgggaggctgaggcagtgggatcttgagcccaggagtttgagatcacagtcagctatgattgtgccactgcactccagcatgtatgagagaccctgtctcaaaaacaaaaaagattctgtctcaaaagaaaagaaaagaaaagaaaatgaaacaagtagtatagtataataagtctacttactctacttccattttcataaaatttcatttcacatagtaatagatttactatactaatagaagaaagaaagaaaatggaatcatattaaatgctcagttggaaggaaaggaggcagaaaaaaagaagttgaaaaaacagacaaacataacacaattacatatgtacgtagtaatccaactatatcaattgccatttaaacatgtattatctatagataccaatataaaacaaagattgatagagtagaaggaaaaaacaagacccatgaatgtataaagaaaactattttaaatagaaagacacagatacattaaatacaatggtataaagaaatatatgccattttagccctaatcaaaaggaatatggaacaggctacattagactcagataaatcaggttgtagatcaaggaaaattacaagagatagagatatttcataatgataaagtgctcaatcctagagacataataatccttgatatgtatgtccagaaaatagagcatcaaaatgcataaggtggctgggtgtggtggctcacgcctgtcatcccagcactatggaaggccgaggtgggtggatcacctgaggtcgggagttcaagaccagtgtggccaacatagtgaaaccccatctctactaaaaatacaaaaaattagctgggcgtggtggcaggtacctgtaatcccagctactcgggaggctgaggcaggagaatcacttgcactcaggaggcagaggttgcagtgagccgagatcgcgccattgcactccagcctgggcaataattgtgaaactccacctcaagaaaaaaaaaaaatgcataaggcagcagtccccaacctttttggcgccagggactggttttgtggaagacaattttcccatggaattgcgctgtaggggaatggtttctgatgaaactgttccacctcacatcatcaggcattagattctcataaggaacgcacaacctagatccccttgcatgtgcagttcacaacagggttcgcgctcctatgagaatctaataccgccactggtttgacagcatgtgcaggcggtaatgcttactgcctgccgctcatctcctgctgtgccacccggttcctaaccagctacagaccagtactggtccacagcctggaggctggcaactcctggcatacggcataaatttataaaactgcaaggcaaatacacaaatccataattatagttgaaggagaacaattcccctctatcaataattgatcaattgagtagaaaaatcactaaggacatagctgaactcaacagcatcattaatcaactggatttaattcatatgtatttatagaatacttcactcaacaccagagtacacattcttctccaaactacataacatattcaccaggatggactatattctgagccataaaacctaccttaacaaatttaaaatagatattctgtaaagtatgcaatctaaccatattagaattaatctagaaaccagtaacagaaacacagttgaaaatcttccagaaagtcgacatttgaacaacaaacatccaaaatacatgaaagacaaaccgaactgtcaagagaaatttaaatattctgaagttgatgagaaaactatatcttagggccaggcacagtggctcacgcccataatcccagcactttagaaggccaaggtgggtgaatcacttgaggtcaggagttggagaccagcctggccaacatggcaaaaccctgtctctactaaaaatacaaaaaattatctgggcatggtggtgcacacctgtagtcctagatactcgggaagctgaggcaggaaaattgcttaaacccgggaggtggaagttgcagtgagctgaaatcatgctactgcactccaccctgggcaacagagtgagactgtgtctcaaaaaacaaacaaacaaatatatatatatacatacatacatacatacatacatatacacatacatatatatacatatgtgtctgtgtatatatcaatgtctgtgtgcatatatatatatatatatatatatatatatatatatatatatatcttagccaaaaacacttttcatagagatgagatctatattccccaggctggtctcaaattcctgggctcaagtgatcctaccaccttggcctcccaaagtgttgggattacaagcatgaaccataatgcccagccttagcgaaatgtttgaaatgtagcaaaggcagtgtttacagggaaattcaaagaattgaatgcaaactctggaaaataaagatctaaaatcaatgctccattttgagaaactaaagttccattttgagaaactaaagaaagaactccaagataaatcactcagaggaaaattacaatgagaatatattaatgaaattgcaaacaagatatcaattaaaaacatcaataaaatcaagagctagttctttaaaaagaccaagaacattgctaaacccacagccaagccaactcagaaaaaaaaagggggccatcactactattcctatgcacattaaagtgaccataagggactattcagagcaattgcatgtctacagatttgtttaattacatgaatgggccaattccctgaaagacaaaatctaccaaaactcacaaaattagacccatgtaatacgaacgggcataatctatttaaaaattggaatcactaaataacaaatgtcccaagaaaaaggaaccagaccaggatggtttcactggtgaactctggcaaacacttatggaagaaatgacaccaattttctacaatctcttctgaaaaagagaagcagagagaaatcatgttataaggccaacattgcccttgcactgcaactagacagatgatacagacatatctccgccatgtaagaatataaaaggaagactgctatctgcaaaccaagaagcaggcccttactagagacttcatctgcttgaacttggaaacccagcctctacatctttgagaaatgtttgttgtttatggtatgcagcctgtggtaatctgttataatagcttgaggtgaccacacatcaaggctttgaagtctatagtaatgaggagagtatggtattaaccacaatgactaaaagagaaaccaatggaaaatagccaattctaaaacaagatcaccaatttaagacacaagaacctatgacatgcaggtattagcaggcaacgatataaatgggagacacttcaacacaaaagacagggacaaatggttatcttcaagagaaaaatcaattttctgctcatcatcttcacatacaataatcaactcactatacacctacctgttttgtgaattcttattcacttgatattgccccagtttccattttggtttttcgtttttgttttttttgaggcagactctcactcactctgttgtccaggctggagtgcagtggctcgatctcagctcactgcaacctccacctcccaggttcaagcaattttcctgcctcagactcctgagcagctgggactacagatgcgcaccaccacaccccgctaatttttgtatttttagtagatacagggttttaccatgttggtcaggctggtatcgaactcctggtctcaagtgatctgccagcctcagcctcccaaagtgctaagattacaggcatgagccactgtgcccagcccagcttccattttgaatttgctttgaacactctccaagcagaaaatgggtttgtaatctcagatacactttcttgttctctacctcctcctccttcctcaatgtggttgatccagatatctcccttacgtaaccatctttctgtcaccatgtccctatgggacagctaaatacaacttgcctgactcaccccccacagcccacatggactgcagacatgtgtagcagtgaccacctctcagtcaaagctggactctggggaacttgcgcatacttccttttaaacacaccaattagaactccccaagagaagcctggttgggtaacccctgggccccaataaaggcttcagctcatgagtccccctccctctcttgttccgcacatactggtcaagtgtccatgtaactcaagaccgctaactcttggtcttcaaggcatgctaatctcttctgtctaggatgtctatgtaaatgcactgtttctattatttcctgtattttgttgagttgccttttctatgtcgcacctgaccaacacatctgaacctaagttctatccagatcaaagctctctttgtaggattgtcttggctgcggctgtcttggtagaaataaaataaaaatttgtcagaaaaaaaaaaaacccacgaaatgtcagcaaaaacaagtgttcttgaagaggaacacttggtcactagtctgacatttaggcattattaggccccgaccaggaaaaagaaaaacctaaagggtcacatttggctggcttccaaattaatctacctgggggaggtcttctgatccacggcccacatcctgtccctgagtaaacaatcttatcctgggctgggggtggtggttcacgcctgtaatcctagcactttgggaggccaaggcaggcagatcacctgaggccgggagtttgagaccagcctgaccaacatggagaaaccctatctctactaaaaatagaaaattagccaggcatggtggtgcgtgcctgcctactcgggaggctgaggcaggagaatcgcttgaacccgggaggcagaggtgatggtgagcggaggctatggtgagccgagatcacaccattgcactgcagcatgggccatagagcaagactccgtctccaaaaaaaaaaaaaaaaaaaaagaatcttatcctgagtccctcaaatcatattgtgagttcttcaaactgctgatgctctcattaacatgtaacctactgacatcaaaaaggatcctgattcgtttctaaatcatgaagttttcctgattgtcttccatgtagaaccttttagcctgtatgttgtcatgtgtaaccaatgtttataacctctgaattgtaccctccaatgaaaaggacaattcaccaatgaggagtccccctcccttctcctaaaggttcttaggaaagcgtctgatttgtaatggaggttggaacacatccaaatttgctggtgtgtcttcctgggtcaatcctcaaatttgaccagtaaacctacataaaatgacttctacctcaatagccttaatttaggtcaacagaaggctctcagaaaggcacaatttcagaaaatgaaagcccacaagggaaaaatgttctgcaccaatgctaatcagtaaaaaccaatatatactcatatggagataaataaaagataagtctttgtaaggaataaacacacacatgcgtacacggtcagacaggtaatgtacacatgccattagaatttcttagaaaacttaaattcatccataatctacgaccagtagtgggaatattgaggagagaaagttaccccctggggaaggctctggaaaccaagggacttactgtgacccctataaagagttaggttgaggagacaggacggtggattagacaggatggtggacttcagactctgctgtccaggggaagggtccgcagaccgggtagtcgcccgtagggaagtctgggtcctgccccagctggtaacagctggttccaaccaacccctcctcccgtctccggacccctaggccgtgcacacgcaccatttcctggcttccacggtgtcccggggtcttctctacggctcctgcggcctgtgcgggtcccagtgtgccagaggctgccacagaactttcagggcgtctcttagcaacagagctgggaaccaagcgcaaggagtggagaagatgccctgggctcttggaacctcacagcctcctcgcggcagctcccttattcacagttctcacgaccccaccccacgtccctgattgagtagtgtaccatgtcctgccccctggggaactcagtgacagaagaaggtatctcttggtgctgagtggaggcagaaaaacaggttccagacccagaccctcacagagcgatcttcttgcctagtggttcctagtgctgtgaccttatcccgcccctggggacatttgcatgtgggcataatttcccacctgtactcaatgagctcttactacctcttcccctggacagatcacaagtctgtgctgggaatcccagaccactgtccagtggagccatcccctagcctcagagcaggaggggagcccaagccacacaggccaccctgcagcaggagggaaggcctgatatcctccagggatcaggaatttcagatggggctgctggcgacatggccaagcctttctcccaccttatctctcaatctactcattttcagctcataaaagcacatcaacaatgaaataaaactgttacatgcatggaaaaactggaattataaggcaacagtcttctataaaggaatcaaaagagaagaaaggaagaaacatgaactagctcaaagcagcagcctgctgaacccacagttcacaagcaaactccctttcaggaggtcaaacagattcccaagcttaggagccaaactctgactcctgaaacaatctagtgatgaggcagggacatggaagcatttaacttttggcactcaactcgccctcctatcctgcttgcacactgtggaaacactcctttcttcaacactttaaatgttaacgaattaaacgctccaatcaaaacctgaaacattagactttgaatctgaaaacatgagttttgccatgtttttaaggaccagacataaaagcattgtgaggccaggcgcagtggctcatgcctgtaatcctacctagcactacgggaggctgaggcgggcggatcagctgaagtcaggagttcgagaccagcctggccaacatggtgaaaccctgtctctactaaaaatataaaaattagctgggcgtggtggcacgtgcctgtaatcccagcttcccgggaggctgaggcaggagaatcgctggaatccaggaggtggaggctgaagtgagctgagactgtgccattgcactccagcctggtgacaaagcgagactccacctcaaaaaagaaaaagcatcatcaactgaaaggtggaatccattgctaaaagaaaggaaccaaacatgaggtgtcatcagattaaatgaaatcttctatttttaaaaactgtagcttttcctgacagggaaaatgggcatgtttggcaaataagaaataaatgatgtctgattataactcatcaacaaataattttcatgtcttaaaaaatgacatacacacacacagtctattatcacaagattttgttccctccttgaaggataaactactgctctgcaagatgctccacccttcactcctcacattaactgctgctagcatatttatttgttccaaaacaggtataaaaagagggttcagtgtgtcaaactacatgattgttagaggtttatgtacagattttgtatatttttacaaactgcaccagttaagtagttgatttatgttgtttttgttttttgtttgtttttagacagagtctcactctgttgcccaggctagagtgcagtggtgcaatttcggttcactgcaacctccgcctcccaggttcaagcgattcccctgcttcagtctcccaggtagctgggattacaggcatgcatcaccactcccggctaattgttttttgtttttagtaaagacggggttttgccatgttggccaggctggtctcgaactcctgacctcaagtgatctgcctgccttggcctcccaaagtgctgagattacaggcatgagccactgtgcccagcctactgtgttgattcttacaaaagctctagtacaaaaataaatgttcacgttaccatgatgaaaaactcaggaatggtgactcctcgattcctctgaaaaacaattttttttaaccctaagagaagctaggaagtctacagtaaatggctggaggtgatccctgagagaacacattttagtggaaaaggtcactcatggaaaataccaaaatttatatgtagcagtttaaatatactacaggaaacactgcgattacattcttcagttacctctatgacagcatgatggtttttttttaggtagggtgtttctttttggttttcttttaaaaaagaaaactgtaggctgggcacagtggctcacgcctataatcccagcactttgggaggccaaggtgggcatatcatgaggtcaggagatagagaccatcctggctaacacggtgaaaccccatctctactaaaaatacaaaaaattagctggtcatggtggcgggcacctgtagtcccaactacttgggaggctgaggcaggagaatggcatgaacccaggaggcagagcttgcagtgagccgagatcacgccactgcactccagcctgggcaacagagcgagactccatctcaaaaaaaaaaaaaaaaaaagaaaagaaaactataaatctttccccacaactgtaaatctttctcattcatagagatatcttcctaaatgtgctactaaacttatatttatattttcaccatttcagtgtgacttcattttaatgcatgctgttataagggtctcagttgctcttctctgcaggtcaatatctgttgcgggaagtcagggacaccaaatggagggaccggctggaaccgtgacagaagaacataaattatgaagatttcatggacatttatcagttcccaaaattaatacttttataatttcttacggctgtcttcactgcaatgtctgaacataaattgtgaagatttcgtggacatttatcagttcccaaatgatatttttataatttcttatgcctgtctttaatctcttagtcccgttatcttcgtaagctgagaatgtacatcacctcaggatcactattgtacaaattgattataaaacatgaaatcagtgcaccttaaaaaagaacagaataacagcaattttcaaggaacaagggaagataaccatatggtctgactgcctgtggggtcgggcagaatagagccatatttttcttcttgcagggagcctataaacggatgtgtgagtaggagaaatatcactgaattattttcccagcaaggaataccctggggaaggaatgctttcctggggggtggtctataaacagcaactctgggagtgtctgtcttacgtggttgagataaagactgaaatacacactggtctcctacagtaccctcaggcttactaggattgagaaattccagcctggtaaattttggtcagaccggttctctgctcttgaaccctgtttcctgttaagatgtttatcaagacaatatgtgcacagcgggacatagaccctcatcagtaattctaattttgcctttgccttgtgatctttatcaccctttggagcatgtgatctttgtgacttactccctgttcacacatcccctccccttttaaaatccctaataaaaacttgctggttttgtggctcagggtcgtcatcacggtcctaccaatatgtgatgtcacccgtggaggcccagctgtaaaattcctctcttcgtactctttctctttatttctcagactggccaacacttaaggaaaatagaaaagaacctacactgaaatattgggggctggctcccccgataaatatccaattttcctagcaccctgttgaaaagactttccccattcatgtatcttggcctatttgctgaaaatctattaacggtcaatgaagggtatctttatctgtttctgctgatataatgaaatactatagatggggtaacttataaggaacagaaattggccaggtgcagtgactcatgcctgtaatcccagcactttgggaggctgaggtaggtggatcacctgaggtcaggagttcgagaccagcctgaccaacattgagaaaccccgtctctattaaaaatacaaaattagccggtcatggtggcgcatacctgtaatcccagctactcagaaggctgaggcaggagaatcacttgaacccaggaggtggagtatgcagtgagccaacatcacgccattacactccggcctggacaacaagagcaaaactccgtctcaaaaaaaaaaaagaacagaaatttatttttcacagtcctagatactgggaattccaagataaaggtactagcatcgggtgagggccttcctcttggatcttctggagggaagaaatgcttgcatcctcacagggcagaagacagaagggcaagagagggcaaaccccatccatcaagcccttgtagtggcattagtttattcatgagggctttgccaaaaggccaaaggcctgcctcccaaaactgtttcactggggattaaattctaacctatgaattttgcaggggaaataagcattcaaaccatggcaaaggggatgatttctggactctcagttctgtcttactgatctgtgtatcagacatttttccagtaggtctggctactatagtccttgacctgatgatggagagctccaccccattccacatgattgtcatgcacggatagaaatggtcctaaagcctccagaagatctccttgacatactcttagacaacatagacttacttctattttgggatagctcctgtaaatgaattgttaaggaaaacataataatgggttatgcaatattttctttctttgttttttgagacagtgtctcactctgtcgcccaggctggagtacagtggtgtgatattggctcacgcagcctctgtccccctactcaagcaatcctcccacttcaggtttccgagtaattgggatgacaggcatgcaccaccacactcagctaattttttaactttttataacaacaaggtctcactctattgcccaggctggtctcaaattcctggcctcaagtgattctcctaccttgatatcccaaagtgttgggattacaggcatgagccatcatgcctggcctaggcaatattttctctacatgaaacacttgaggcatactcttcactcactgtaaaatcagtatgagcctagagctcatagctcttactacatcttgcacgctgacaaacaggaaaactgcctctactgacacagactgcagatatgcttttggaattccttatgcaactggcacaatttgaaaaatttgtggattcacaacttgttctggtatacccactgccgatagacacataactgggctactattttttttttttttttttttgagatggagtcttactgtgttgctggggctggagtgcagtggtgtgatcttggctcactgcaacctctgcctcccgggttcaaatgattctcctgcgtcagcctcccaagtagctgggattataggtgcccaccactatgatcagctaatttatttttgtatttttagtagagacagggtttcaccacgtgggccaggctggtctcgaactcctgacctcgtgattcgcccacctcggcctcccaaagtgctgggattacagaggtgagccaccacgcccggcccataactggtgaactattacagatgatttgcctccctattaaaatggccactgttcactgtctagtccatactacggagatttatactatatctctagggaatgatagggctcaaaagattgctaaataggaagccaaaaatggtaccttgttctttcccaatccagtttgcaaaactgcctttacccgtgactgatattatcaagtaaatgtcccataatctaagaagatctatagatacaaaagggaaaaatagtattgtagagattatacattaggccagtcacactccctgtgctattaatactttccttcaatcttttcccttacacaaatctctcaccaagttggacatagaggcagatgggaaagagttaagaaaacgaaagacaactgactggcctggcatctacaaaattactgacccacttatttctcagtgcattacttgtaacccacccaatttctggatgaagctcacaaatttcacagaatcctccaacacccacactgaccctcccagccctccaaatggatggtttatctacaactgtagtcaattctcattgtttagtgattgtctccatgtttagtggatgggcgcaatgctatacagctagacatgatgatgccatcagtggtaaataattaatcattgaaattattcctggttttagtattcttttgtggacagaacaaaaccaatgaggtaattttatatgtgctgctgaagcgagcacaaccaaggaggtaattttatagctgatataaaccacattcttgcaaaaactacggaagacttattaaaatacataccatccttaaccatcagagcaaagagaatataaaaatctaaacataaaaaggactttagagaaatagctgtcaaaacactggacttcaatggccagaagcattagccctggcccttataaaaatctgaaatactaccaacagtagacatggattatctccttttctgtagtttttgggttttggttgcactgtagctattggtatatctaaactttacattcctggattgagtaaatattcttgggaatgaagtgaacaatatgatgctatgactagctacatgtaagaactaaccagtggccgggcatggtggctcatgcctgtaatcctagcacttcgggaggccgaggcaggcagatcgcttgaggtcaggagttcaaaactagtctcgccaacatggtgaaaccctgtctctactaaaaatacgaaaaagttagccaggcatggtggtgggcacctgtaatcccaggtacttgggaggctgaggcaggagaatcgcttgaacccgggaggtaggaggatgcagtgagctgagatcatgccactgcacttcagcctgggcgacacagtaagactccatcaaaaaaaaaaaaaaaaaaaaactaactagtatatttggagcatgtcatcaacaggttaaaaaaaatgccatcacttttgaccaaaagataaggtatttccaggtgtggtggctcaggcctgtactcccagccatttgggaggccaaggtgggaggataacttcagtccaggggttcgagaccagtctgggcaacatagcaagaccctgtctctgtaaaaaaaaaaaaaaaaattagctgaatgtggagatatgtctcagtagacctagttactcaggagacagaggcaggagcatcacatgatcccagagtttcaaggctgcaaggggctgatcatgccagtgcactgcagcctgggcaacagactgagaccttgtctataaaaaaataaaaataggtcaggcacagcggctcacgcctgtaatcccagcacattgggaggctgaggcagctggatcattcaaggttgagagttcgagaccagcctggccaatattaaaccccatctctacttaaaaatacaaatattagctgggcatggtggtggacgcctataatcccagctactcgggagtctgagacatgagaaccacttgaacctgggaagcagaggttgagtgagccgagattgcaccactcctctccagcctgagtgacagagtgaaactgtgtcttcggaaaacaacaacaacaaaagaatattattcaggcataaaaaagcaatgaattactgacatatgctaccacatggagggaacctgaaaacatgctaagtgaaataagccagacacagaaggacaaatattgtatgctccacttatttatttttttgattcgtttttttgagacagagtctcactgtcacccaggctggagtgcagtggtgcgatctcagctcactgcaacctctgcctccatggttcaagcgattcttctgcctcagcctcctgagtagctgggactacaggcgtgcaccaccacacccagttaagttttgtattttcagtagagacggggtttcaccatattggccatgccggtctcgaactcctgaccttgtgatccacctgcctcagcctcccaaagtgctgggattacaggcgtgagccaccacgcccagccctagatgctccacttagtcaaattcacagagcaagagagtagactagacgtcatcagggattgagtgtagagaagggaagttgttttttaatgggtactgagtttctgtgtggagcgatgaaaatctagagataattagctgtaatggctataacacattgtaaatgtatttaatgctcctgaatgacacacttaaaaatgattaaagtggaaattttatgttagtacatgttacttcaagacaatttatgaacaaaagaaaagacacaattcaagctactatatatgaacacaacaatatctagaagcactggatggaggttggtgtggtggcacatgcctctagtcccagctactcagagcctgaggtggaaggatcgcttgaactcaggaattcaagcccaacaggggcaactagtaagaccctgtctcttaaaaaataataataatgataataataataataataatgcactgaatggacaaaacagcagaggagatattgctgaaataaagataagtgaacctcaaaaactaggagtataaccgatttaaaatatagcactcagacaaaaaaatgaacagaacctcagtgagctgtgtaatgggacaattgtacaaggactccttgaaagacaggagtaaaaacagaacaaacaaaaaatatttccataaatatttcaggccgagcacaatggctcaggggtttattgagctttttggatctctaggtttatagttttcatctaatttggaaaatatttgctgtaatcccagcactttaaaaggccgagacaggcagatcatgaggtcaagagattgagaccatcctggccaacatggtgaaaccctgtctctactaaaaatacaaaaattagctgggcatggtggcacgcgcctgtagacccagctactcaggaggctgaggcagaagaatcatttgaacctgggaggcggaggtttcagtgagacaagattgcgccactgcactccagcctggcaacagagcaagactccatctcaaacaaaaacaaaacaaaacaaaacaaaacaacaataacaaaactagcagtaacaatatgttttacacaggagtttgagaccagcctgggcaacatggtgagaccccatctctacaaaaaaaattaaaaattagccagattgccgggtgcggtggctcacacctgtaatcccagcactttgggaggccgaggcgggcgtatcacgaggtcaggagatcgagaccatcctggctaacacggtgaaaccctgtctctactaaaaatacaaaaaaattagctgggcttggtggcaggcccctgtagtcccagctactcaggaggctgaggcaggagaatggcgggaacccgggaggcagagcttgcattgagccgagatcccgccactgcactccagcctgggcaacagagtgagactccgtcgcaaaaaaaaaaaaaaaattagccaggcatggaagctcacaccagtggtcccatctactcaggaggctgaggtggaaggatcacttgagccttggaggacgaggctgcactgagccatattcatgccacagcactccagcctgggtaacagagtgagaccctgtctcaaaacaaacaaacatttgtcgcatattttccaaaacagataaaaattatgaacctacagatgcaaaatgctcaacaaaccacaggcacaatatatatcaacaaatctacaccaagacacagcatcaaattgctgaaaaccaggtataataaaaaattctttaaagaaaccagagaaaatagacaccttaacaacagacaaccaaatgtaacattgattacatacttattatcagaaacaatgcaaacaggaagacaatggagtaacatccttaaagaactaaaagaacaaggatatcaacaaagaatcttatattgagcaaataatatctttccaaatgaatggaaaatactttatttagtcataataaatgtgtttgcaatcagcatattggctcattgagaaaggtacagccgggtgtggtggctcacgcctgtaacctgagcattttgataggctgaggtgggtggatcacctgaggtcaggatttcaagatcagcctggccaacatggtaaaaccccatctctactataaacacaaaaattagctaggtgtggtggcgcatacctgtagtcccagctacttaggaggctgaggcagaagaatcacttgaacccaggaggcggaggatgcagtgagccaagatcgtgtcactgcactccagcctcggcgacagagtgagattccgtctcaaaaaaataaaggtccagctgggtgcagtggctcatgcctgtaattgcgacactttgtgacgccgaggcgggagaattgcttgagtccagaagttcaagaccagcttgagcaacacggcaagactccatctctacaaaaaaattaaaatggcatggtagtatgtgcccgtccagatcactgaatccgtaaaaaaagaaaaacaggccaggtgcggtggctcatgcctgtaatcccagcagtttgggaggtcgaagcaggcagatcacctgaagtcaggagttcgagaccagcctgacaaacatggtaagatcccatctctactaaacatacaaaaattagctgggcgtggtggcgggcacctgtaatcccagctactcgggacgctgaggcaggggaatcacttgaacccgggaggtggagaaagcagtgagccacgagatcatgccattgtactccagcctgggtgagacaatgagattccatctcaaaaacaaaggaaaacaaaacaaaaaccaaacaaacaaaaaccaaactggctgtcttactactggggtggctgagtaagtcctctaaactactattcctatcaaatggtccttggacacacccttagagttttctcttcccaagatgatttttcatcttggtaatatggatagactgggaattttccaaatctttttgtttcagttccatcttaataattccatctccagtcaagtctttcctcacattagtatatgcagtcaagaggaaccaagctgcctttttcaacacttcttagaaatgttgtcaactcaatatccaatttcatcacttcctagttctactttccacaaaactagcacaggaccacgatacacaaagttctctgccactttataagaagaaatcaacttttctccattgtgtaataacattaacctcaattctctttttacatatattttagtttgtttcagaaacagggtctcactctctctccagcccaggctggagtgcagtagcatgacctagcttactgcagccttgaactcctgggctcaagtgatctggtgacctcagcctccctggtagctatgactacaggcatataccaccaagcctagctaaattttccttttttctttttttgtaaggatgaggtctcaccatgttgcccagactggtcttgaactccaggcctcggttgggcatggtggcacacacctgaagtcccagctacttgggaggcctgaggcaggaggatctgttgagcttaggagtcggaggtggcaatgagctataatcacgccactgcactccagcctgggcaacaaattgagatccccatttccaggaaggaagggaaaggagaggaggggaggggaggaagaagagaagagaagggaagggaaaggggaaggagaaggggaaggggaaaaggaagaggaaggggaagggggaaaatccaagcctcaagcgatcctcccatcttggccattcaaagtactgccataacaggcatgagcgaccatgcacattccactttcatttttgaggatccactctcataatctaacctaatccttatcatatctcaaagaaaccattgcctaatactgccacatcagggaagtggaaaaataaataaaattttctacaaacatttattccataacaagtgattagtagctttttatcattttctaaatactcttcatgttaatcccttatcagatatataatttggaaatggtttctcccattctatgggttacccatttactctgttaatattgccttttgatgccaaaggtccacaaaatccaaattattctttcccttgtgggtcatgcttttggtgccaaatctaggaaatcattgccaaattcactgtaatacagcttttgccatgtattttcatctaacagttatacagctaagatggacactcacatatttcgttcattttaacttctgtacatgttaggtatgggtacaacgtcatcctgttgcatgtggatgtgcattgcccaacagcatcattctacagaaacattaagctatcccccattgaatagtcacagcagacttttcagtaattgttagactttatgtaaattattagactttattagactttctgtgttatcttgttgcattgtctatttctgcgttattacgctagtaccaaacagtttttattagtatggatttgtaataagttttgaaatcaggaagtgtgagttcaccaactttgttctggctttttttttttttttttttgagacagagtctcgccctgttgcccaggctggagtgcagtggcatgatctcagctcactgcaacctccacctctcaggctcaagtgattcccctgcctcagcctcctgagtagctgggattacaggtacgcgccaccatgcccgactaatttttgtatttttagtagagatgcgatttcaccatgttggtcaggctagtctccaactcctgacctcatgatccacctgcctcagcctcccaaagcggtgggattacagatgtgagccaccacatctggccattgttctggcttttgaagactgttttgttcattcagagacccttgagatgtcatatataaaaaaataaaaaatgttaaaaaatggctcctaagaaggaatcaagtggtcaaacctatccctaaaaggctagcaggggacaaaaagtggtatctctcaataagaaaatacaaacctaagatgttttgaaaagtggtgtatcaccttggaaagttcgtcataaggtaagaacaaaccaagaaatcacacactaaagcagagagaagctgaagttcctcaaagtgttagagctgcccctacagtggcaaaaatgatccctctagttcatgataaactaaggataagcattaagtgtgtggctagaggacacgtcacagaaccacagccctactgatggtaacatcatacttgaaaaaacacttagccaggccaagcgcagtggctcactcctgtaatcccagcactttgggaggccaaggcgggtggatcacaaggtcaggagttcgagatcagcctgaccaacatggtgaaacccagtctctactcaaaagacagctgggtgtggtggcgcgcacatgtaatcccagctactcagaaggctgaggcaggagaatcacttgaacccgggaggtgggggttgcagtgagccaagatcacgccactgtactccagcctgggcgacagagcaacactccgtctcaaaaaaaagaaaaaaaaaaaagaaggaaagaaagaaaagaaaacaaaaaacacttagcctctgtaagcatcactgtgagggggctgaggagagcaagaggaaggagtttgaagccagtaagttctggctaggctaactatgcaacacagtgcagcccaagaacttgaagaccacaggagaattggcatcggctgatgccagggaaacaacagcattcctagaagagctcataaaacagaaaaaagacactaccttccagagtaaatcttctattgtcatgaatcaggcatgttctagaagatgcccaatggtaccttcatacatgagtgcaggtactggggttcaaggcctggaaagaccacctttttctggtgctgtcaggccatgcattagttcatgagaacaagcgaggcttcgtctactgagcaatcaccaggttctttaggacaaaagcaaaacttgctggcctgtgtcctggcaagaacataagaaggctttcttctagcaatgcttcactcctgatgtgatggaatacctcaaagagaagggactgccactcaaggtcttcctcagaattgacaacactccaggccatctctccaatctctgttttgcctaaaagaacatgcaagtgatatttctgcctcctaaaactacatcactgctgcgtcactagatcaaggcatcaagtgcattcaagtgacttacatccttgggtgaattcatggagtcttgatgctaaccttgaatgtaccacagtggttttattgaagagcttcacaattacaaatacaattgtgcttattgggaaggctacagatgccctaaagcccaggacagccaatacatgttacaagccatcatggggtaagggagtcaatgatttcaaggacttccctactattaatgcagttattaagaatatgtgaaatgttgcaaaaaaagttggtggggaacgctgtctgaaatgactgaggatgacgttaaggaacacaccgaaaagcaaagagaaacccttaccagctaggaacttcaaagtctgctgaaatccactacagatgatgatgagctagaaaacttagaagacacagagccattgatttggacacttgaaaagtttgccacagtttttcagtaggcaaaggtgaaaaagaggtacgatcctcaaagatcctataatggaacaaagctttcaatctacctgagaaacaacaacatgcctataagcaccacaagatttttttttttaatgaagcaaaggaaaagaagaactagcttcctatagctaagcatctgcaaataagacggaacattcaatggttttttcagtaggcaaaggtgaaaaagaggtacgatcctcaaagatcctacagtggaacaaagctttcaatccacctgagaaacaacatgcctataagcaccacaagattttttttttaatgaagcaaaggaaaagaagaactagcttcctataactaagcatctgcaaagaagatggaacattcaatggttacagatcttcagccctcaagccaaacagatcctaacattagtattacatagcctcctcaaatgagtccacatctataatcacaagttggttcttccaacatagatgatagtcctgatggcctgtcaagattcaagttaacctgatgtctcactacttacccacaatgccatacatctagtcatctcaacacatcaaaacactgggcaccacagaatcatcatcattgttataatcactatacttgggttatcaagagagaagacccagggttttggtaagtgttaacacattaaacagaagaaataggtgagagttgaaacaaagaaactttaatgttctggctgactacactatgttgataggctcacaattactgcatctatactgaaaatacatagactcttttccttatcatgattccctaaacaatacaatagaacaactatttgcatagcttttataatgcatgaggtattttaagtaatctagacataattgagactatacaagaggatgtgggtaagttacatacaaacatgtcattttataaaagggactggacatggctcacggagtgctggaaccaatacccagcaggtatcaagggatgactgtactggaaagaaactgaaactacttaaggctttaccaagtgcttacattcacagggtctatctccaatgtgtttcgtacaagtatctgaaatgaaataaaattaataaatgctttcccacattccatacatttagagagaatgctagtgagtctttttatgtctatgcaaggaactgagagaagcaaatgctttcccacattccttacattcatatgggttctctccagtgtgagtttttttccagtgagtctttttatgtctatgcaaggaactgagagaagcaaatgctttcccacattccttacattcatacgggttctctccagtatgagttttttcatgtccttgaagaaaacgggaatgagtgaaggctttaccacattgtggacattcataggatttctctctcatgtgaattctttcatgtcgtagaaagcaagtgagccaagagaatgctttcccacattccttacattcatacggcttctctccagagtgaattctttcatgtacctttaagttatcataatgaccgaaggctttcctacatgttttacactcataaggtttctctcctgtgtgagtccttttatgtcgagaaaggtatctgaaacgactgaatgctttcccacattccttacactcatatggcttctctccagtgtgagttgttttgtgattttgaaaggaacagaaatcaatacaggctttcccaagtttgcatttatagggtttctctccagtatgagttgtttcatgccttcgaagggaactggaaatacggtaggctttgccacattgtttacatttatagggtttctctgcagtgtgagtcctttcatgtctttgaaatacactgggataaacaaaggctttcccacataccttgcatttatgaggtccatctccagtgtgcattatcatatgacttcgaaagcttgagcgatgagataatgctttcccacactgcttgcattcatagggtttctctccagtgtgagttctttcatgactttgcagtgaactaggacaatcaaagcctttcccacatatcttacatttatgaggtccatttccagtgtgccttatcatgtgtctttgaaagcttcccagatgatgaaacgctttcccacattgctgacatgcatagggtttctctgcactgtgagtggtttcatgtctttgaagggaaccggaaacactgaaggctttcccacattgtttacatgtatagggtttctctccagtgtgagttctttcatgtattagacaagaactggaatcagggaaggctttagaacactgcttacatttatatggtttctccccagtatgtgttctttcatgtcttagataggaactgtaaaaaggaaaggctttagaacactgtttacattcatacggtttctccccagtatgtgttctttcatgtcttagataggaactgtaaaaagaaaaggctttagaacactgcttacattcatatggtttctctccagtgtgcgttctttcatgcatatgtaataaactgggccaaaaaaacgctttcccacacaacttacatttataaggtccatctccacgctgcactgccatgtgtctttgaaggtttcccaaagaactgaaggacttcccacattctttacaatcatatggtttctttccagtgtgaagcctctcatgtgtttgaaatgagttgtggtaactgaaggctttcccacgttgtttatgcgtatctggcttctctccacattcatgatactcatgtggtttgtgcccagcaccaactctgatgtaacaattaagggatgaatgacccatgactttttctcctctcatactgctttcacaaggacctactccaggaagagtgttcttggtcacaatactatcttgaatctggctagatgtttctccacattgagttccatctttactttcaacaaatctctctaacatacgacatctgtaaaaaatgggaaatatatcactaaaagtcggtctataaataattgtataggtattaataagtattggatgtacatttttaacactatcatgcgaagtgcaggcttcgtgtcctgcttgaatgtgaatggatggaatgctgtgcaaggtaactcgacccaggtgttctcaagacaatcacattcatatgtggattcataatattgttgtcatgggaactaatttatgaacactgaacagctatggaacatttaagtatatattttggagaaaattttctaagaataaataaatttaagctagccttgttcattttctttgcttctttttaaattttcatgtcattctcagaacggctccagggacatatctttctcttgtgagtgtaaattaccttagatttttcctgggatatctatattgatcttcaatgttctggtctttccatttcattactaaaaggtatacacagaaaaatcattacaaatttttacaaaattatagacaaacagtaacattttgatgtacactgcaatcgttcaaaatgcattcactgaagtacacctgactcttgaaaaacagaggtttgaactgcacaagtccatttgtatatacatatatatatgaatgttcttcagtctctgctacccaagacactaagaccagcccctcctcttactcagcctactcaatgtgaagacaatgaggatgaaaacctttccgaggatgcacttccacttaatgaacagtaaatatagtttctcttccttatgattatctttttaacactttctgtttctagcttactttactgtgagaatatacgatgtaataatacgacataaaatatatgtattaatcactgcttatgtgactgataatgctgcccatcaatagtaggctaagatgtggacaaaaagttatatgaggatgtacaactgctacaggagctggcacccctaaaccctgtttttttttttccagggccaaccatatcccctttccatattccaaatctttgaacagcatgaatgaccaagaaacaaatgtctccaattaaataagtggaaatgcgatgtcatccttacctacacaatccaggttcctgatggtttcctgcatcacatctttgtagagattcttctgacaaggacccagcaaagcccactcttctcgggtgaagttcacagccacatcctctaaagccactgaggcctgatccatcccacatgtacagaggaggaagggtgaaaatcacagtactgagaatctatactcacttcataaatttcacatgatgctgtggtttccaaccattttattcaatgacatggtaaacccactcttattctctgtctacactcactttctcctacacagtaactctgaagctacagttaaacgtttggtaaattaacagtgggatagaaacatgccacttgttggcgaactaagtgagtgaatcacatagcctggatcacccctaatgtcgatttccacagtgggtctgcagtccttggcacgataaagtcctactacttattgtgcaaaagggagttaccattagcagtgctgagactgcgtgtccttacaaatgctttttcacaaagttgggcttttcatggtgtctagacagtgtatttaggggagggccccaggagcataataacaggggtggagtgtgcctaaattgttcatgcaaaaaaaatatagtatttcgttaactcccatcttccttctgagagtctggaattttgttacatactcagcagacagagtgcactgatcagccactgctaggtttgaatggttgtcccctccaaaatgcacactgaatgttaatctccaaagtggcagaaaaaaaaaaaaaaagaaaaaaaaagtgggggctttaagaggtgatttagttctgagggtctggacctcatgaatagattaatccataatgggtgaatgaataaatgagctatctcatgtccttctgagaaaagaaagagatctgagctagacactcagctccctcaccatgtgatactctatgccacctagagactctgcagagtccccatcagcaagaaggtttctcatcagattcccagccttaaccctggacttcccggcctccagaaatgtaaaaattaaatactgtttcttataaattaccgaggttcagtaattctgttatgaattacaagaaacaggctaagacagctacaaagaaacactctgggcattgggtctataatgagctttctgggtagataatatttcacatgttttgttgcaacttgttatttgggggatttagcccatcctatgtgattatacttacagagaatatttggaagctggcaactagtttcctttagatcaaatgtagtgaagtatcacaagagactgataaaagatatttcaccatctcaatggaaaaattttaaacattttcttgagtaatgccaaaaggagaaggaaagaaggggaaagactgcatatattcttagaaagaactcaatgtcatctctcatgaatatttataatacttcctaaataactaaaacggaccttttagtagtcaacaaaaattacattaccaagtctaatagaactcacagtatctaaaaaatgctggaaactttctcaccaagaaagtgcagctttccaaaaacaaagaattttgaaactataatatttggctccccatactattaacacagagacaaatatatacatatacatatatatatatgaagaaaaatgaaaactggtagaaaagtctcgtagagtttttatttgtccttggcccaatctctcccccatcaatgacactcttgaacacagcagcccgagttcccagtatagaaccctgaacactaactctagagacagcagatcagaccttatttgcaaattattgccttgcattttccaatctgtataagcactatccaaaggtctgaaacaaggctgctttttttttttttttttttttgagacagagccttgctctgtcaccgagactggagtgcagacacatcacccagactggagtgcagacgcacaaccttggctcactacaacctctgactccagattcaagcaattctcctgcctcagcctcgcaagtagctgagagtacaggaatgctcaaacacatttggctaatttgtatttttactagagacggggtttcaccctgttggccaggctggtctcaaactcctgacctcaaatgatccgcctgccttagcctcccaaagtgctaggattacaggtgtgagccacagtgcccagccaaggccctctcttctactttatctacaatataacacgatcagggtccaatttggcaggaactgcatgaaaatgttgcaaaatacacaaaaagcctgtagacaactgcaagaacagactatgattaagacatacagtagaccaactaagtcacggagaaaaagagctgaagagaaaatgtcctccagatatcagggtactcaaaagcacccaggtatcctagggaattgagaaagccccatgcatgcacagtaaagaacacattttcacaaaagacaccggagaaaaacattcattttcgcttctggctgatctgtagctttaagtaagcagaacataaagcataagtagagtattaaacagcctggctaagtgttcaagggatgccccaggcacagagccatccacaaagactggaagaggtcaggcttttgtatgcttcatcttttttactagcttctagcattcaggaaatctctgccagaacactggatgaacacacactaaagaacagagatgtcagtttctacaacaaataaggaatacagtctgtgcaaacatactttgaaaatgttattaaacaaatgaacaattacagtcttcaacacacataaatagaaaacagtgaggaaagaagaagaatccaattttcagaagtaccccattataacattccgatatctacttttcaacacaaaattatgaagaatacagaaaaacatgaaaatatggttcatcaattggaaaaaatataattgagataagccatctctgagaaacctcagacaccactcactgaataaaaacgttaaaacaactatcttaaatatgttcaatgaagtaaaggcaatgatgaacaaataactaaaagaaaaccagaatatagatacagagataaaataatatctattaaaaagtagaaattaactgggcgtggtggctcacacctataatcccagcactttgggaggccaaggtgtgtggatcacctgaggccaggagtttgagaccagcctggccaatgtggtgaaaccctatctctactaaacatacaaaattagctgggcatggtggtgcacgcctgtaatcccagctacttgggaggctgaggcagaagaatcgcttgaacccaggatgtggaggttgcagtgagccgagatcgtgccactgcacttcagcctgggcaacaagagcgaacctctgtctcaaaaaaaaaggggtagaaatttagccatatagaatttatgcagctgcaaggtacaactaaaatgaagacatcttcacaagtgttcaacagatgtgagcagccaaaaaaaaaatcagttaaaatgatgataaatgaattgaaattaatctaatggggaaaaaaaggaatgaaattgagagaacatgtgattggtgtacttgtcttgccaataatgttaaaagaagttcatcagagagaagaaaaatgttacaggttagaaattcagatcatacacacacacacacacacacacacacacacacaaatatacacatatgcatatatatgaagagcattagaaaataattcaatgaaggcacaaaaattatttccttttcttattcctattggatatcataaaggtttgttcaaaaaataataacaatgtattgggtggttatagtttataatagggcaaatggatgacggtgatgttaaattgggcaggagggaggaatgctgaacactgggttatatgagcattaccctaaaagccagtacagtgttacttaaaactgaaggtccatttgttgtgaatggtttactccaaatgctagggaattcaataataaaatgttaagaaacaacagcctgtcacagtggctcagccctgtaatgccaacactttgagatgcaagacaggaggattgcttaagatcaagactttgagcccacactcagcaacacaatgagactgtctctacgaaacgtgtaaaaaattaaataaataaaaaaaaaattagccaggtgtggtggcctgcacctgtagtcccagctactcaggaaagcaagtagggaggatctcctgagcccaggagttggaggttatagttaactatgattgctccactgcactctagcctaggtgatagagcaagaacctgtctcaaaaaaaaaaaagaaacaaagaaacaaagaaacaagtagacttactatactattagaagaaaacacaatcatatagacacctcagttaaaataaaaggagacagaaaaagaaaggaagttgaaaaaaaccgacaagtataacaaatataaaacaattatatatgtacacatgaatccaagtatatcaataaccactttaaatgtgtattatatgaatataccaataaaagaagacaaggactgacagagtagaataaaaaaaacaagacctaccaatgtgtgcaagaaaactattttttttattctctcaagaaaactattttaagtagaaagacacaggtacattaaatataaaggtatgaaaaaatatactccattctagccctaatcaaaagccatatggggatgggcatgatgctcatgcctgtaatcccagcactttaggaggccaaagctggtggattgcccgaggtcaggagttcaagaccagcctggccaatatggtgaaaccccgtctctattaaaaatacaaaaaaaaaaaaaattagccaggcatggtagcacgcacccgtagtcccagctactcaggaggctgaggcaagagaatcgcttgaacgcaggaggcggaggttgcagtgagctgagatcgtgccactgcactccagcctggacaacagagatgctgtctcaaaaaaaaaaaaaaaaaattggtcttagctggaggtgggggcattggcctcaggcctctctgccatagtcaaagctactctcttacccttctatgctttacatggatatttaaaaacaaaatactcatgtttgatgaatccaggaaaatcactcaaattcagtgtctatgtctacgggtgggaaggaaattgtaaggcactgacattttatagctcaacaggaaaagcccaaatacctatcccttccagacaatgaatgtcatttaattactatttccatgatagtaagtgatatagtaaaaaataattatattttacttctttagctgttggaaagtcctgtcccacagaatttagcattcatctgtcagatataacaggaacagaacagatttctccattgtcccaaaatctccacccttttaaaaaggagaagaactgaacttttgttaaatctttttaattcaatgtacctattacactttcttgtaaaaatgtattccttttttgcagccataatggaagagggtttttcccttggtagtagttatactactaagtcctgaaattccatctgaaatcatccgaaaaacaaacacacctgagaaacgtactacacaagctctggggcaaaaaaaataaataaaggcttttaaaaaatggaatagaagattacatataccatttatattctgaagtccaactctttctagtattacttataaaatttattttctgaagtccgactctttccaactttgggtatactttgtcttcaaagtataaaataacaatctctaatcataggatgtatttcacggttaatcaaaaatttaggctgaaaagagtaaacatatcttttcaagctaacaaactcaggaatcagcagtgctgactggaacacagaaaagtctaatgcaacaatcagtgcaggtcatcctatcacctgggacatcccttaaccctattctgttcgccaccctcctaggagacactcaccaccctcctaggagacactgccttgtgtgcttttcaggatcttgcactacctcaaagggcaggttctccagtccttagatataactttctaccttttaagtctgagagagtccagaaggcaaaaatcatttccgttttttttcctatggaatatgaccatgaaattggctgttcagtcatgtgtctccaaggaatggaaactagggttgggaagaaaaggtgagtgtcccaggagttagctttttacaggaattatataccagaagattcctcccatcccagtggatccagttgctccccagggggccacaccttccatctcaggctgtcccctgggaggagtgacccaggggatgatattcactagaccctccaagagacttggcagctgtggacatccattttttttgagacagggtcggcctctgttgcctaggctgggatgcagaggcacgatcatagctcactgcaacttcaaactcctgggctccagccatcatcccacctcagcctcaggagtagctgcgactacaggtgccagctaccaagcccagctaattttattattatcatttacactagagacaaagtcttgccatgttgcccaggctggtctggaactactgggatcaagcaatacctctgccttagcctcccaaggtgctggaattacaggaatgacccaccgtgttcaggaacccaaaacaattctttcaagaaaaagccatacattgctagctgaaaacaagatgacaaactagtgaaatatcgcctggggccaaacagttcatactgttgctgtgaattaaggacagaaggttagcctggggaagtctctggaaaccaagagatttgctgccagccctaggaagagtcaggatgagagaacacagtggtggatttgagaccctgctgcccacgtctttggaagactcagaggggaaacggtcgcccttggaaaggaagaaaggactgaggaccacggaaaccacagctcctcccacacacaaaccccacacacgagtctggattccacctggtgactcgtcgtcaccgtgcagcctcctcaccgggttcacaggaactgcgagccaggctggaggcgagattgcagttagatattaaacaggtgccctcagccccgctgcctcaaggggccgcctccctgagagtcaggtcacagcagacgctgaccgccggcttccccattgtgcctggggataagatctccgagtgctgctcaagagtcgccggagttctcagatcctgaatcccagcagaaaggctggcgccaaccaggttgaagaccccacgagggagccctctcagcagaatgcggtttcttcacctcctgtcccaggattcacccctcacttccccaccaaccaaggacgctacacccagccgcccccgtccagaccccaaatccctcagggaggcggatctggggtgtcctcccctctcctcctgttaaaccgtttctgctgcagccctcggcgtctcggtgcagtgagtcgggccgcgaacctgtgttggttacagccgcacaatctggggagacccggggctgcgggctcggagctgcccagagagggcgccggggccgcagtcgccgcgcaggaacgggacaggacgcccggggtcccggctgcatgcccagccccaccctgcggccgagggccgacctacgccagggggacccgggtccgtagatcccgaagtcgcccttggggaggcccgggtccagccacagccgattacggccggttccacctaacccctcccccgcctcgggacgccggcccagcacacgcaccatttcccgacttccgcggtgtcccaggtcctaccgacagctcccgctgccaatgcgtgttccagccagacaaaggctgcctcagaacttccaggtcgtctctcagctacagaacccagagccgagcgcaggtgggtggagcagacgccgcgggctttttcaaccacacacacttctctgggcagtgcctgattgacagttcccacgaacccgccccacgcccctgattggatagggcgtcaggtcccgccccctgagggctgattgacagaagaagcgatcttgcacagctgagtggagccggatgagcaagttcctgacacagcccttggcagggggggcttcctccctgctctttgatctgaatcctcccgggttatatttgcacttaagcggaatttcctgcccgtactcaataggacctcctgcttcttcctcctggacacggactgacaaactaattatatctttttttttttttttcctcgagagggagtcttgctctgtcgcccaggctagagtgcaatggtgcgaggctcactgcaaccttcgcctcctgggtgggttcaagcaattctcctgcctcagcctcccgagtagctaggattacaggcacgcgccaccacccggctaatttttgtatttttcagtagaggctgggtttcaccatgttggccaggctggtctcaaactcgtgacctcgtgatccgcctaccttggcctcccaaagttctgggattagaggcgtgagcaactgcgcctggctccaattatgctctttttcaatgaaatttttcaagatttttcaatgtacaattaaattattttttactatagtcactctgttgtgctagcaaatactaggtcttattcattctttgtaactattttttatacctattaaccatccccacttcccccataactactcctcgctactacttttcgcagcctctggtaaccatccttctacacatttttggttgtttgagatggggtcttgctctgttacctaggctggagtgcagtggggccatcatggctcactgcaacctctacctcctaagctcaagcaatcctcccacctcagcctctcaagtagcttcagattgttcactgttggcatataaaaatgttattgatttttgtgtgttgatattgtatactgcaactttactgaatttatttctcagttctaatacttttttggtggagtctttaggtatttccagatataagatcatattatatgcaaacaaggataatttgacttcttccttcccaatatggatgccctttatttctttttttttcttttttttttttttgtcttattgctctagctgggacttcaagtactgtgttgaacaacagtggtaaaagtgggcattcttattgtgttccagatcttacaggaagggctttcagtttttccccattcattatcatgctagctgtgggtctgccatatatagcttttattatgttaaggtatgctccttctttacccacttttttttagggtttttatcatgaagggatgttaaatattatcaaaagctttttcagtgcacattgaaatgattatatggtgtttgccctttattctgttgaaatgatacatcacattgattgatttgcatatattgaaccatccttgcatcccagggataaagcccacttggtcatgatgaatgatctttttggtgtattgttaaattcagtttgctagtattgagttgaggatttttgcatcaatattcatcagtgacactggcctatagttttctttttctgacatgtctttgtctggttttggtgtcaaagtaatattggctttgtaaaataaatttggaagtattgccttctcctctgttttttggaatagtttgagtaagattggtattagttcttttttaaatgttggtagaattcagcagtggagccactgggttctggggttttctttgctaggagactttttattatggctttgatctcattatttgttattggtctgttcaggttttttatttcttcatggttcaatgttgctatgttctatctgcctaggaatttatcagtttcttctaggttttccagtttattggcatatagttgttcttagttgcattaatgatcctttgaatttctgcagtatcaactgtaatgtctcctttttcacctctaattgtatttatttgggcctggttttttcttagtctacctcaaggtttgtcaattttgtttgtcttttcaaaaaaccaactttttgtttcattgttcttttctattgtttcttcatttcaaattcatttatttctactgatttttattatttcttttcttctactgattttgggtttggtttgctcttgcttttctaattctttaagatgcattcttaggttgtttatttgaaggttttcttcttcttctttttttttttttgagatgagtttcacttcactcttgcagcctaggctggagtgcaatggcgcaatctcagctcactgccacctctgccttctgggttcaagcagttctcctgcctcagcctcccaagtagctgggattacaggcaccgaccaccatgtcattttttgtatttttagtagatacagggtttcaccatgttggccaggctggtctcgaactcctaacctcaggtgatccactccctttggcctcctaaagtgctgggattacagatgggagccactgcacccagcctgaaggtcttcttcttttttgatgtaggtgcttatatctataaacttccctcttagtactgcttttgctgtattccataggttttggtatgttgcattttcattatcatttgtttgaagaaacttttcaattttcttcttaatttcttcattgacccactcgtcattcaggagcgtattgtttaatttccatatgtttgtatggtttccagaattcctcttgtcattggtttctagtttattccacttattctgtgacacaatttatattatttcaatttttcggagcgttttaagacatgttttttgacctaacatatggtctatccttgagaatgattcctgtgctcaggaaaagtatgtgtattctgtagctgttggataaaatgtgctgtaaatatctattaggtccatttgatctatagtgtagattaaatcccatttaatctttcttttgtccaatttttcagtatatattgaaataatctttgttgatttactgtctggaagatctgtccagttctgaatatggggtgttaaaatctccagctattagtgtattggtgtctatctctctctctctctttttttttttttttttgagacagagtttcactcttgttgcctaggctggagtgtagtggtgcaatcttggcttactgcagcctccacctccaaggttcaagcaattctcctgcctcagtctcccaagtagctaggattacaggtgcccaccaccacacctggctaattttttgtatttttagtagagacggggttttgccatgttggccaggctggtcttgaactcctggcctcaggtgatccacctgccttggcctcgcaaagtgctgggattacaggcataagccaccatgcccggccctctctctttttacctaataatatatgttttctatatctgagtgctccaatgttgggtgcatatatgttcacaattgttacatcgtcttgctgaattgacctctttataattgcatagtgaccttctttgacttttcttacagtttttgtctcgaaatatattttgtctaagtattgctactcctgctctttattggtttccactggcatggaatatgtttttccattcctttatttccagtctatgggtttctttataggtgaagtgtgtttcttgtgggcaacagatcattaggtcttgtttttttaatccatttagccattctatgatttttgattggatagtttaattcatttacattcagtgttattattagtaagtgagaacttactcctgccattttgttatttgttttctggttgttttttcatcttctctcccttctttccttccatcctgtcttctttttagtgaaggtgactttctcttgtggtatgatttaacttcttactttttattttttgtgtatctgttgtacattttttgacttgaggttgccatgaggtttgcaaatactatcttataacccataattttaagctgatgacaacttaatgctgttgtataaacaaagaaacaaacaaaaagaaatctaatgaaaactctatgccttaacatcatacccgcttcttaacttttctttgtttctatttatatattgcttgtactgtctgtgttttgaaaagttgttgtagttattattttggatttgttcatcatttattctttctacttaagaataatttacggccaggcgcggtggctcaagcctgtaatcccagcactttgggaggccaaggcgggcagatcacaaggtcaggagatcgagaccatcctggctaacacggtgaaaccctgtctgtactaaaaatacaaaacattagccgggcatggtggcaggtgcctgtagtcccagctacttgggaggctgaggcaggagaatggcgtgaacccaggaggtggaacttgcagtgagccgagatcgcgccactgcactccagcctgggtgacagagcgagactctgtctcaggaaaaaaaaaaaaaaaagaataatttacacaccacagttacagtgttacaatattcttttttttttttttgagatggagtctctgtcgcccaggctggagtgcagtggtgcgatctcggctcactgcaagctctgcctcccaggttcacgccattctcctacatcagcctcccgagtaactgggaccacaggtgcccgccaccacgcccggctaattttttgtatttttagtagagatggggtttcaccgtgttagccaggatggtctcgacctcctgacctcgtgatccgcccacctcagcctcccaaagcgctgggattacaggcgtgagccaccgcgcccaggcttttttttttttttgagatggagtctcactctgttgcctgggctggaatgcagtggtatgatctcagctcactgcaacctccacctcccaggttcatgtgatcctcctgcctcagccccgctagtagctaggattacaggcacacaccaccatgcctggctaatttttgtatttttagtagagaccgggtttcaccatgttggccaggctggtctcaaactcctgacctcaggtgatccacctacctcagcctccgaaagtgctaggattacaggcgtcagccaccgagcccggcatacaatattatttttgtgtgtgtgtacttactaataccagtgagttttgtatcttcagatgattccttattgtacatccttttgtgattgatgtagttcctttagtatttcttgtagaataggactggtgttgatgaaatccctcaacttttgtttgtctggtaaagtctttatttctccttcatgtctgaaggatattttcactgaatatgctattcaaggataaaagtttttttccttcagcactttaaatatgtcatgctgctccctcctggtttgtaaggtttctattgaaaagtcttctgccagttgtattggagctccattgtttgttatttgtttcttttctcttgctgcttttagagtcccttctttatccttgacctttgagggtttgattactaaatgccttgaggtagtcttctttgggttaaatctgcttggtgttctataaccttcttgtggttggatattgatatctttctttaggtttgggaagttctctgttattatccctttgaatgaactttatactcctatctctttctctaccacctctttaaagccaatgactcttagatttgcccttttgaggctatgttctagatcctgtaggcatgcttcaatgttttttttttttttttttttttttttgagacggagtctcgctgtcgcccaggctggagtgtagtggcgcaatctcggctcactgcaggctccgccccctggggttcacgccattctcctgcctcagcctcccgagtagctgggactacaggcgcccgccacctcgcccggctaatttttttttgtatttttagtagagacggggtttcaccgtgttagccaggatggtctcgatctcctgacctcgtgatccgcccgcctcggcctcccaaagtgctggggcttcaatgttttttattctgttttcttttgcctcctctgactattttcaagtagtctgtcttcaagctaattctttctttcttttttttttttttttgaggcggagtcttgctctgtcgcccaggctggagtgcaatggtgctatctcggctcactgcaagctccgccccccaggttcatgccattctcctgcctcaccctcccgagtagctgggactacaggcacccaccaccacacctggctaattttttgtatttttagtagagacggggtttcaccgtgttagccaggatggtctcaatgtcctgatctcgtgatccgcccaccttggcctcccaaagtgctgggattacaggtgtgagccactgagcctggcccaagctaattatttcttctgcttgatcaattctgctattaagagactgatgcattcttcagtatgtcaactgcattttgaactccaggatttctgcttgattcttcttcttctttttttttttttttttttttttgtgagatgaagtctcactctgtcacccaggctggagtgcagtggcgtgatctcagctcaccacaaccctgcctcccaggttcaagcaattctcatgcctcagcctcccgagtagctgggattacagacatgtgccaccatgcctgactaatttttatattttagtagagatggggtttcaccatgttgtccaggctggtctggaactcctgacctcaggtgatccacccaccttggcctcccaaagtgctgggattaaaggcatgagtgactgtgcctggccttgattcttttaaattatttcaatctcttcattacatttatctgatggaattctgaattccttctctctgttatcttaaatttctttgagtttcctaaaacagctactttgcattctctgcctgaaaggtcacaaatctccatttctccaggattcgtctctggtgccttatttagttcatttggtgaggtcacattttcctggatggttctgatgcttgtggacatttatccctgtctgagcattgaagagttaggtatttattgtagtcttctcaatctgggcttgtttgtactcatccttgttgggaaagttttttagatatttgaaaggacttaggtcttgtgatctaaggcatctctacattaaggggcatcccaagcccagtaacactgtggttcttgcagactcttagaggtaccaccttgattatcttggataagatccagaagaattctctggattaccaggcagagatgcttgttctgttctctcttttcttttctttctttctttctttcttttttttttttagatggagtttcactcttgttgcccaggctggagtgccatggcacaatctcagctcaccgcaatctccatctcttgagttcaagcgattctcctgcctcagcctcctgagtagctgggattataggcatgcaccaccacacccggataattttgtatttttagtagagatggggtttctccatgttggtcaggttggtctcgaactcctgatctcaggtgatccatctgcctcggcctcccaaagtgctgggattacaggcatgagtcactgcgcctggcctggtctcttctctttactccaaacagcatgtctctctcttgctctgttctgagccacctggagctggggctggggtgacacaagcaccctggtggccaccatcactgagattatgccgggtcagacctgaagtgagcacagcagtgggtcttacccaaggcctgctgtaaccactacctggctaccacctgtgtttgctcaaggcgctgaggctctacaaccagtgggtggcaataccagccaggcttgtttccttcccttcagggtggcaggttcccccaggccctgtgtgggtcaagaggtgctatgcaggagccagtgactggagtaaaaaaactcagaagtctacctggtgttctaattgtactgtggctgagctggcactcaaatcatgagatgcagtcctttccactcttccctcccctttccacaggcagagaagcctcaccccatggccaccaccaccaaaggcccatggggagtactgccaggctactgtcaatgttctcttagagaccaaaggctcttgagtcagcttgtggtgaagctgcctggcctgggattcacccttcagtgcagtgggctcccctctggctcagggaaggtccagaaatgccatccaagatccaaggcctggaatcagggatcccaacaacccacttggtgcctaccccactgtggacaagctggtaccgaacatgcaaaagtctcttttgcttttccctcaacttttttcaagcagaaggagtctctccctatagccaccacagctgagaatgttctgagtttcactcaaggcctatggtgtactatcagggtattgctgctggttattcagggcccaaggactcttcagtcagcaggtgatgggtccttccagaactgagtcctttccttcaaggcagtgggtttccttctggcccaggatgtgtttagaaatgtcatccaggagctagggcctgcaaaggggacctaatgactatgactggtggcctatcctactgtggctgagctggtatacaaagtgcaagataaagttctctttactcttccctctcctcacctcaagcagaaggaaggggtctcttttggagccgtgagctgtgctgcctgggattgggagaggggtggcacaagcactcccttagctgccctaactgttgtcttactaggttacatgcccaccaagtccactggctctgagcccagctcagtactaggaattgcctcagagttgcagtccttgtggcctagacagcccttcaagtttacttaggattccagagcattttagcccacagtcgtgaggctcactggaactcaagttccagccactgggatgggtaattcccccctgactagagctgactatttatttatttatttatttacttattttgagatggagtttcactcttgttgcccaggctggagtgcaatggcacaatctcggctcaccgtgacctccacttcttgggttcaagctattctcctgcctcagcctcccaggtagcttggattacaggcatacaccaccacacccagctaattttgtatttttagtagagacgaggtttctccttgttcgtccggctggtctcgaactcctgacctcaggttatccgcctgccttggcctcccaaagtgctgggattacaggtgtgagccaccgcacccggccaaaactcaagttttttaagagagtgggcaggaagatccagctcaccttactagccactagagctgatttaaatgctccctctgtgggtgggcatcagctgaattcagcctggttttgctttctacttgttggtagaagagctgaggcaggactggcttatctgtcataatataaaagagtcttggaagatgtctggggtccagggtctaaaacccctcgtggcctttggaacaccaaactctgtgccaaggggtggaaggctgccctgccgcaccacaaatctaagcccagggcataaaacccctcatggcttggatggaatccagggcttagggcataaaacccctcgtagcctctggaatgtgcacagacttgttggttgctctcccaggttcgtaaacatgttctctattatctccaagcagcagagcatattatatatgcatcaaagaaaatgctaaaccatcacagatacgcttgatgcaccactacctttctaacctcacaccctcacctgtttacccctacgtcctcaagacctgcttctttgtttgatcaccaataaataatgtgggctcccagagctcagggccttcgcagcatccataccagcgttggccccctggacccaccttatgcactcttaacttgtcttttctcattcctttgactacgctggagtttgtagcccccacggcctggtgttgggtctgatcaccccaacatttctggcacccaacgtggggctacgaacactccggtgaaggaacactagagtgtgcggaagcggaggacacattgtcagaggacacccaaggacgactgaaagaagcttggtgggtaagctgagcactcagaagaaccaggttaacaatggaacagaatgaaagtaaatattctgcttatttaaatttcttaaggcatttattatggagagggggagtgaaagttaatactcagaacttattaacactctttgatacagtagagcagttttgcccatggttcccagaacaaaggacaatggagctagatgaatggggaagaattggcagaaattttaaaaacgcatataaagaaggagccaaaattccagtttctgtttggtcagtgtgggagttgataaaggcagttcttgagccatttcaaacagatgacaaggcagattcagatgaggaagaggtagatgagtgtaaaaaattaacttcagattctgaatatgaggaacagcaaccggaagaaattaaagaaaagaaatggaaactgaaaaaggtatattttactagcccttcggttccacctgctgaattaagtgaatggccacctcctccctctccccctaatgggtgagaagatgaattagctgtaaaacttaccgctccggtagctgcaacattaaaacctggagcaattggtgatgcgatataaaattttattcagaaggctagaactgaaggagacctagaagcatggcaatttcccattactataatccagagaggaggacagaatatagctagttgggccacctttccttttaagttgttaaaggaattcaagcaagccattagtcaatataggccaaattctccttttgtacaaactttactaaaaaatgtggctcttgataatagattaataccatatgactgggatactttaacaaaatctgttctcactccatctcagtgtttgcagtttaaaacttggtgggctgataaagctcaaactcaggcaagagaaaacacacaagcacagctgcctgtgcctgtttcctttgaacagttaatggggttgggccctaattggggccgattagacaatcaagcagtaatgaaaaatgttgccattgttcagttatgcactgtgtgcttacaggcatggaaaaaaaatgttacagggtaaaaatatccttctttcattagacctatgagagggaagactcatttggctgaatatattaaggcttgtgatggcactggggaaaattttagtccagctatggcttgactaaaggtgggaaaaaatatgccccatttctcaggctcttgttttaattgtgggcaatttggacacataaaagaggaatgtagaaaaggaaatcagaaggcaaaaactattgccatcaatcaacagaaaagtccaggtgtatgcccccaatgtaagaagggcaatcactgggcaaatcagtgtcattctaaatctagcaaagatgggcaacctctttcgggaaacgggaataggggcccaccttgggcccctcaacaaactgaggcatatccggcacagtcagtgcccttacaaacatacaacaattgtcccccgccacagcaggcagcgctgctgtagatctctgcagcacaattcccgtttccctacttcctggggagccaccaaagaacgtcccatgagagttaggagccctttaccctcaggaacagttggtctattgcttggaaggtctaatttaaatttaagaggtgtcgctgtacataaataattgattctaattataccggagagattcagttagttattagttcctcaattccatggtctgctttcccaggagaaagaattgctcagttgttactgttaccttatgcaaaactgggaagaggcacagtagaaaaaaaaaaaataggaggctttggtggtacgaatccagcaggaaaagctgtatattgggttaatcaagtgtctgataagagacctatttgtacagtaaccattcaaggaaaggactttgaagggttagtagatactggagctgatgtttctattattggtttaaatcaatggccccggcattggcctaagcagaaggcatccattggtattgttggagtaggggctgcctcagaattttttaaagttctttaattttgccatgccaagggctggatggccaagaagggacaattcaacctattgttacacctattcctgtcaatctatggggtagagacttattacaacaatggagtgctaaaatatctattcctatggatcagtataataataacagtaaacaaatgatgagaaaaatgggatatctcccagggaagggactaggaaaaaaaaaataaaaatggccaaccagaacctttagaactaaaaaggcaaacagatcgaactggatcagggtatcatttttaggagctgcaattgctgagcctccggctcccattccgcttgtttggttaactgccaaaccggtttgggtggagcaatggccgctgaaacaggaaaaaccggaggctttaaaagaattagtgcaggatcaattacaaaagggacacatagagcctactttctccccttggaattctcctgtgtttgttattaagaaaaaatcagggaaatggagaatgttaacagatttgagggctgttaatgctataattcagcccatgggctcactgaaccagggctgccctctccaacaatgatcccaaaatactgacctctcatagtaatagatttaaaaaattgcttttctaccattcctttagctactcgagattatgaaaaaattgcttttactgttcccactataaataacaaagaaccagcggacagataccattgaaaagtactgccacaaggcatgttaaattgcccgactatttgtcaaacttatgttggaaaagctattaagctagttagagaacaattcaaaaaatgttatattatccactacgtgggtgatattttatgtgcagctgaaactagggaggattaatgctatgctacaaacagttagaaaaggctgtaactgcagcagggttaatcatagcccccaataaaatccaaacttctactccctttcagtatttacgaatgaaagtaaaacaaagtactattaaacctcaaaaagttcaaattagaagagataatttatagactaaataattttaaaaatcattaggagacattaattggatttgtcccactttaggcattcctacttatgctatgtctcacctcttttctaccttacgaggtgattctaacttaaacagtaaatgctccctgtccaaagaggccttagaggaacttcaattaattgaagaaaaaatttcttgttttattccattagtgaggacatctaggatgatgatgaatagcagtggtgagaggaggcatccttacctcgttcctgatctcagtgggaaagcatctagatatcaaaattaagtatgatcttagcttggcttctttttagaggttctttatcaagtgggagaaatttgcttctatctgctattaggtttatggacctgagcatgccacctaatcattgcttttcccttttctttctgtaaaaaatccctcagaattcatataaagttgcgagtttcaggttggttggctctgactgatcacctgtattatggaccatctgtgtgattatggggaaaagttcaggacaccagcaacctacattggataggaccacctctgactccagggattgccactcaatctttctgagattagcacccacatccaacaaggtaattttgcctaagaccctggtgggaaccaacggccttgtgatctcaagattatccctttgacatgctggtaagcagcagtactacagaaaacaatgtagccccctggctacttgttttgctttggaagaacagttgagttacatcctctcatgctttggaaaggattgataccaaatgtaccttcttttctttgctcatcagtgcctgaccatggggtatcatggatgtgcatgtttcaatagcctcccactcaccccattggtgagagaggaattagggccctagggctatttaggtaggctaacacatgatatccatcactggacaaatgcaactgacaacagtttattagtcatatatattcacagcccagatgaggagggtaccataagtcatgcagatccacaaagaaaatgtatttgggagcagagggcccaaacatggctgtgggaaacaggctttgtagtatcaaaagggtgaggtaccccttggttcccctgggaggatgtgattcacttctttgaataatgtgtgggttagcaaggatctgaaaccccttatacaagagacaaagactatataactatgctataatagtataaaactgtattatgcattatagtataatagtaattatatattttagttatacataacatataccagttatgttttatatatacaattatatatcattatgtaatatattacatattatatacacaaatatatctataaatgtacatgtaaacacactataggctatactagataatgctatactacatagtagaaaatggtccagaaatatctcttttgaatatagctgcagaggcccgacaaaataccagcaaattgaatccagcaatatataaaaagacctatacaacatgaccaagttggattgagctcagaaaagcaatgttggtttcgcatataaatatatattaatataccatatttacagaataagggatctattatcataggatcatcccaaaaggcacagaaaatgattttttttttttttagacagggtcttgctctgtcacctaggctggagtacagtggtgtaatcatagctcactgcagccttgaactcctgggctcaagtgatcctcccacctcagccttctgagtagctagggctacaggcatgcaccacaacactcagcttatgtttaaatttttctgtaaagacgaggtcttgctatattgcccaggctgatctcaaactcctggcctcaagtaatcctcctgcctcagcctcccaaagtgttggaattataggcgtggctcacacctggccaggtaatgaatatgacaaaggccaataccattttacaatgaaaatactcaatagagtacaaataggatggaactttctcaatgtgctataaggcagctatgagaaacagctaacatcatacttgatggtgaaagattgaacgctttttatcttagatcaagaacaagagtgtctgcttttatcacttctattcaacatgttaaagaaggtgctaccagggcaattaggtaagaaaatgaaatgaaagcactccagatattaaagggcatacatacatagcccctcagacagacatacaacatcgcacagacttgatcactgcacatacaggtggacaaacccagacacagacacacaaacttccaaacttacaaaccctcagtgattaaagccctagatacaccaacagatgcccccagagacatcaacagcccaggccctctgcaatgttccccagcttcctttccctctttaggactaaccaccatctgatacatcatgtgattttgcttgtatctcatttcttgcctcctagaatgtcagcttcaagggaacactattagctaaggtttgttcactatgaaacctacaaaggacatgttacatagaagagtttaatatgtattgaattattggggctctctgtcacacacatacacacacacccacacacctcgttatagggccacatccatttgatcttaagagtgaattgttaggccgggtgcagtggctcatgcctgtattcccagcactttgggaggccgagatgggcggatcatgaggtcaggagatcaagaccatcctggctaacacagtgaaaccccatctctactaaaaatacaaaaaaattagccgggcgtgatggtgggtgcctgtagtcccagctactcaggaggctgaggcaggagaacggagtgaacctgaggcagagcttgtagcgagctgaggtcacgccactgcactccagcctgggtgacagaacgagactccgtctcaaaaaaaaaaaaaaaaaaaaagagtgaattgttctcacttccatcccatgtggcagaaaaagtgtgtaagtattgcaaaacaaattttaaaataagttttaaaatatgaatattttaaaaggatataattatacaaaccttgcaatgttcttctaagtttaaagtttttggctgggcatggtggctcacgcctataatcccagtattttgggaggctgaagcaggtggatcacttgagctcaggagtttgagaccagtctgggcaacatggcaaaaccccatctctacgaaaaaagaaaaaagtcagctgtggtggtgtgcacctgtggtcccagttacttgggaggctgaggtgggaggatcacttgagcccaggaggtggaggttgcagttgagccaagattgcactactgcactccagcctgggtgacagagcaagacagtctcaaaaaaaaaaaaatttttttttttggcagtgcccagtacaggtggtggcacacattaggacttcaaaatccagagattccatgattctgagttacgtgagtttgggtaggatcctgtgccctgtacttaactttcttcatctgtaagatgggagaactgattggttgagcaatcaaatgagatacttataattatgaaatcacagtgctaagtactaacataagttaccactgaaaaaaaatggacaaagattttatttcctttgctcaaatttagtaagacacaaatattttactttccccccactcttcccaaacatgtgaataccaaattgggatctggggactttctggaagcattgaaacaaaaagattcaaactactactcttgtaagaaggcattaaatttttccttatatgatgacaccaaatattcttcctttccattaaattaggctattatgcaaaatgattccctgtctgcagctcacctccattattccttgaaaattaccctctaaacatccatagattttttgggtggtacatattgggtcattcagtctgcacaacagcaaaatgatcatgtcaaatatccaaggcaacttaagaatctttaaaatgacattaaacagaaatgtaaacatcatcaacacctgtggcccaaatcaataggaaatctcaaatcctaaatactcatgtccaaattcatgatcatgctttacatgtctcaaaaattttatccattataaaaataaagatgaaccatatctacacctttgtttatggggaatcattactgttcatcccagggatgtaggactgtattgttccccagcatacatcaaacctgagcagttcctcagtgttttaataagatatgttagataggccaggctcagtggctcatgcctgtaatcccagcactctggaaggctgaggcaggtggatcacgaggtcaagagattgagaccatcctggccaacatggtgaaaccccgtctctactaaaaatacaaaaattagctgggcgtggtggcacacacatgtagcctactcaggaggctgaggcagcagaatcacttgaacctgggaggagggggttgcagtgagccaaaatcacgccactgcactccagcctggcaacagagtgagactccgtctaaacaaaaaaaaaggccaggcgcggtggttcacgcctgtaatcccagcactttgggaggccgaggcgggtggatcatgaggtcagaagatcaagaccatcctggccaacatggtgaaacctcgtctctactaaaaatacaaaaaaaaaaaaattagctgggcgtgatggtgggcgcctgtaatcccagctactccggaggctgaggcaggagaatggcttgaacccaggaggcggaggttgcagtgagccaagatcacactccagcctgatgacagagaaagaccctgtctcaaaaaaaaaaaaaaaagatatgttagataatggaaataaatgatcaatgacaatattggaggtccctaccctccaaagctaaggtatccaacacaaccatagcttccctattaatctcacaggttggttgttatttcatttccttcaaagatcttaattgctttctaaaaaccaaatcctcaccttttattaaccatctctcttttcccaaatctataagcaacaggaaggcaagaacttgtttcatgtttctatatccatagcctacaatgtcttgattatttgtgctgaattgtgtatgctttgatactacagtgccaggcctatgagaaaggttaaaaaaatcagcatcaagagcaagatggcttgatttgaacagtgattctgtctttgcaccttgctaggtttgtggtctctgaaaacttatctacacttacaggactctgctagtgcacaaaagagaaaaaaaagtatatagtttgctaaagactcagtgaacttacatattttgactgagatattttgtggaaaacattgtccaatacaccataagaaatatttccatgtttagataataagaaaggttaagagcagttccacaggactaggatctgacctcacactcagataaggccaagtcttatcctgttgaagagaaaaatgtcacatttccttcatcagacaaagctactcagcaatcatgatggatcaagacaaaaacaataaccatgtctctaaaaatggtaaaagagaacagagttgaagccattaaaatgaccaaaattgccctctactcactaatccaagtgagtggtttcttaggaattaggtttagctccacttcattcttcctgcctctagataagaattatgattaccagtgacacaattaagttcacctcacagcaggcaacacacacaggagtgtctcagtttggtgattagcaatcaagtcacccaacaaatccaaatccaaaaagaagttgttttgagaaggagtcttgctctgtcgcccaggctggagcacagtggcgtgatctcggctcactgcaacctccacctcctggggttcaagcaattctcctgcctcagcctcttgagtagctgggattacaggtgcacgccaccatgcccggctattttttatatattttttagtagagatggggtttcaccatgttggccaggctggtctcgaactcctgaccttgtgatctgcccaccttggcctcccaaagtactgggattacaggcatgagccactgcgcccagccgagcaccctcttactgatactccccagagtcatttatggtttatgatcattcttattcctacaattcttaacactcttctcttgactacaggtgtgatcctggtgatctttgaaaaaaaggcactgaaacaaccatgatttaagtttttggtattatgaatgcatgagaaattttctgggaaaaaatcataactatattaagaataaaaaataaaaaattcctaaggaaaatacttgatcttgtatgcacataatattgactcagaatatatgaggattaactcaataaacttaaaaacttaatctgaaaatcactggattaagaaaatgtggcacatatacaccatggaatactatgcggccataaaaaaggatgagttcatgtcctttgtagggacatggatgaagctggaaaccaccattctcagcaaagtatcacaaggacaaaaaaccaaacaccacatgttctcactcacaggtgggaattgaacaatgagaacacttggacacaggaaggggaacatcacacacgggcctgttatggggtggggggaggggggagggatagcattaggagatatacctaatgtaaaagacgagttaatgggtccagcacaccaacatggcacgtgtatacctatgtaataaacctgcacgttgtgcacatgtaccctagaaattaaagtataataataaaaaaacttaatctgaaaatctataattgcaatggaatattttaatatatccttgcagaaaattaaatagacaagtgatagcatacaagttatttgaaaagttaataaaatatttctaagaaacatctacagaagcttttgttcaacaaaaacatacacatggtttttaatcacatataatgaaacaaaattgaaaatgtactgagagatgacattcaactgtaataggaaacaccgacaatctgcttgatattaggaaggtgcttattcttacactgtaggactgggtaagtgcattccctgcacagtgcagtggagaagcagacacccatgtagttctttttgactgcaccactgtagttgtcacggtggaatcagaaacacatagtcactggtactgttaacaaaacatggtgtttattacataaataataccttggataaattcaacctagagatgaggtgagtcagagcatcagagaatattcccaaccttaagagtctaaatggttgcctggtggacacattagagtttctaggaaaatccaaactgcagtgcatctttgagtagaacttttgaagacaatttgtggaaaactacatctttgaaaatatggcagctggggccatgcacagtggctcacgcctgtaatctcagcactttggaaggccaaggtgggcagatcatgaggtcaggagtttgagaccagcctggccaacaatgatgaaaccctgtctctactaaaaatacaaaaaaaatttagctgggcttggtggtgggcacctataatcccagctacttgggaggctggggcaggacaattgcttgaacccagaaggcagaggttgcagtgagccaagatcgtaccactgcactccagcctgggcgacagagcaagactccatctcggaaaaagaaagtaaagaaagaaaagaaagggaaagggaaagaaagaaggaaggaaggaaggaaaatatggcagtcaagcagttagtggtggttctaagaatactctcaattggcagagcaaaggatcaggacaatgtggtggaagcaggtgtccctgaagctcctatgcatccatctgtctccacatatggtggctataaaacctgactaatgctttcttcacttctgccttccatatctcctgcaagtaggctattggtgaattataccgtggagccataaaaggttagattatagaaaacataggtcacaacataacccatgttaacacaatccaggacagccatttccagctataggttatatggttctatctcagatctctcttattaatacaaagtctattattcaaatcacagccagaaggaattacaaacagcaaacagaagatgaaaataataattccaatgagagagtatactgtatgataaactttgcagactcaaaaatttattatgattattttttagcataaaaaatagaaaaaagggtactctgtcttcctctaaaaaagcctcttttggtcagaaagatgaaatacatataatgatatctagtacctgccacataaggccagtaggaaatcctaaaaattaccaaattgtcattttttgatggcccattacagcacaactaaaaaatacataaaaatcaaaactgctagcttattataaatacacttcaattcactcatgaatctaacagacttcaatatggaaagacaaaatttcagaaactgatttaatgaaaaaatactatcaattcaacttgtgtacaactgtataagagcttacagaattatctcatctcagtgttcttttgtgaaagtaatagaaatccataattcagagatccattttaagaatcagtaactgataatatgttttatcacatttctgacatgttgtgaattttctagaacaatatacatgaattaatttgcatcaggctttcccatattatctacatttatacagtacctccctagtgggagtttcaacatgagattgaagtttcacacataagggagtatcacatgagcatttgttaaaatggaaaacattgctatatctcacttttataggatttctatccagtctgcattctcacatattagtatgtgggccaactgaaggctttctcacaatgtctatatttaagaagtcgctttccagtgtgagtttgttcatggtttccaagtaaactaagacaaataaaggtttttctacattttttacatttatagggttttccacattctttacatttttaaggttataaattctttacatttatagggcatatgaaaattctttacacttcatatgccttctcatggtccttaaaaggtcatatgaccattgaaggttttcccacactgcctacattcgcagggtttcctgtccagtatgaatgcttcctcatattcacatgtaaataactgaaggtattcccatgtcttatagggtttctctgaaatatgaataatttcatgtcttcaaaaggaaatgggggccgggtgtggtggctcacacctgtaatccaacactttgggaggccaaggcaggtggatcgtctgaggtcaggagttcgagaccagcctggccaacatggcgaaaccccatctctactaaaaatacaaaaattaagtgggcatggtcgttcacacctgttgtcccagctactcaggaagctgaggcaggagaatcgcttgaacccaggagacagaggttgcagtgagctgagatcactctactgcactccagccagggcaacagagtgagaattcaactcaaaaaaaaaaaaaaaaaaaaaggaaataggacaactgaaaactttgccatattgcttatatacatagggttactctccactatgaactctttcatgtattcgaaaggaacgggaacacttgaaggctttaccacattgttgacatgcatagggtttctctccagtgtgagttcgttcatggattcgaaaggaacgtgagcaactgaaggctttgtcacattgtttacattcatagggtttcactccagtgtgagtcctttcatgcattcgaacagaactagaacaactgaaggccttaccacattgtttacactcataaggtttctctccagtgtgagtcctttcatgtattcgaatggaactggaacaactaaacgccttaccacactgtttacattcatagggtttctccccagtgtgagtcctttcatgcattcgaaaggaactggaacaactgaaggctttaccacattgtttacattcatagggtttctctccagtgtgagtcctttcatgcatccgaaaggaactagaaaaactaaaggctttaccacactgtttacattcatagggtttctctccagtgtgaattctttcatgcattcgaaaggaactggaacaactgaaggctttaccacactgtttacattcatagggtttctctccagtgtgagtcctttcatgtattcgaacagaactggaacaactgaaggctttaccacattgtttacattcatggggtttctctccagtgtgagttctttcatgcattcgaaaggaactggaacaactgaaggctttaccacactgtttacattcatagggtttctctccagtgtgagttcgttcatggatttgaaaagaactaggacaatcaaaggctttcccacattccttgcatttataaggtccatttccagtgtgcattatcatatgtcttcgatagcttggaagagaaatgaatgctttcccacattccttacaatcatagggtttctctcctgtatgaattctttcatgttttctaaaggaactaggaaaactgaaggctttcccacattttttacatttatagggtttttctccagtgtgaatcctttcatgacttcgaaaggatgtgggacaactaagagctttaccacattgcttacactgatagggtttttccccagtgtgagtcctttcatgtatttgaaaagtttggtaatatctgaaagcttttccacattgtttacattcatagggtttctctccagagtgagttctttcatgatttcgaaaagaactgggatgactgaacgttttcccgcattctttacatttatagggtttctcccctgtgtgcattctcatgtgtcctcgaaaggttgtgtgataaatgaaggccttcccacattccttacattcataaggtttctctccagtatgagttctttcatgtatttgaaaggaactgggccaactgaaagccttaccacactgtttacatttatagggtttctctccagtgtgagttctttcatgtattcgaaatgaacttcgaaagctgaatcttttcccacattccttacattcatatgatttctctccatatttgtgatattcatatgatctatgttcagtatgagatctcatgtgcctattaagagatgaatgacacatatagtcctttccacacacactacattcatatggttttactctagtaaaagttttcttgtttggtttaggatttggagtctgactgatggtttctccaaactgactaccttctttcctttcacagagcctctctaccatatgacttctgtgagaaaaaaacaaaacaaaacgcacaattagtggctttttaaaattaataattttataattattgattatttcacaatcattagtaggtagtagaattacacttttgccattttcagggaaagtgtatgtcatgaatgctcaggaagagtacttgaccagagctattatcaaaacaataaaattcatcacatagagtttatttctttttttttttttttttgagacagagtcttactctgttgcccaggctgcagtgcagtggcacaatcttggctcactgcaacctccgtctcctgggttcaagcagttctcctgcctcagcttcatgagtagctgggattacaggtacccaccaccacacctggctaatttttgcatttttagtagaggcagggttttgccatgttggccaggctggcctcaacctccacacctcaggtgatctgcccaccttggcctcccaaagtgctaggattacaggcatgagccaccatgcctggccaaaattcataatatagagtttcttaatattgtttccaggtgaaatatttttcaaatactgaacatctgtaccatttttaagaaaacgttcttggcaaaaattttcaaaaaataaataaatatgaaatggggcttatttgtttcaattattcattttttaaacctaatggcatgctaagattctctcataagacagtattttcttttgtaagtacaactcaccttagctttctcccctgatttttgtgatcttcaatgttcttctcctcccagttttcccctaaaatgcaggcccagaaaaatcattaaacctattcgaaattacagaaaaattattagattctaaatctaggatgagctgttatcctgtctgatttatttaccaaagtattccctttcaacattctaaaccttggaaccttgctgatgagcaagaaacacttgttctctaattgactaagtgagggaataatttcattcttacctatagaggccaagttaacaaaggtttcttgcatcacatctctgtagagtttcttctgagagggacccagcaaagcccactcctcctgggtgaagttcacagccacatcctcaaagaccactgagtcctgaaacatcccacatgtataggggaggatgggtgagactgacagcactggggatataaactcagttcattaaaagttcatatataattttctccatttatcctgtaactttgtcatcagaactcaaatcttcgtccacacttacttcttcataaatttaacaccaccatgaatacttggaaattatttctacatttttagtatgatcacttcaagtcttatgctctccaatgacaggatacacagcatcttagagaaatgctatacgatactctccctctccctctccccacggtctccctctccctctctttccacggtctccctctgatgcagagccgaagctggactgtactgctgccatctcggcacactgcaacctccctgcctgattctcctgcctcagcctgccgagtgcctgcgattgcaggcgcgcgcgccgccacgcctgactggttttcgtattttttttggtggagacggggtttcgctgtgttggccaggctggtctccagctcctaaccatgagtgatctgccagcctcggcctcccgaggtgccgtgattgcagacggagtctcgttcactcagtgctcaatggtgcccaggctggagtgcagtggcgtgatctcggctcgctacaacctccacctcccagctgcctgccttggcctcccaaagtgccgagactgcagcctctgcccggctgccaccccgtctgggaagtgaggagcgtctctgcctggccgcccatcgtctgggatgtgaggagcccctctgcctggctgcccagtctgggaagtgaggagcgcctcttcccggccgccatcacatctaggaagtgaggagcgtctctgcccggcggcccatcgtctgagaggtggggagcgcctctgccccgccgccccgtctgggatgtgaggagtgcctctgcccggccgcgaccccgtctgggaggtgaggagtgcctctgcccggccgcaaccccgtctgagaagtgaggagaccctcctcctggcagccaccctgtctgggaagtgaggagcatctccgcccggcagccaccccatccgggagggaggtgggggtcagcccccgcacggccagccgccccgtccgggagggaggtgggggtcagcccccgcacggccagccgccccgtccgggagggaggtggggggtcagcccccgcccggccagccgtcccgtccgggagggaggtggggggtcagcccccgcccggccagccgcccagtccaggaggtggggggcgcctctgcctggccgccccttctgggaagtgaggagcccctctgcccggccaccaccccgtctgggaggtgtacccaatagctcattgagaacgggccataatgacaatggcggttttgtggaatagaaaagggggaaaggtggggaaaagattgagaaatcggatggttgctgtgtctgtgtagaaagaagtagacatgggagacttttcattttgttcagtactaagaaaaattcttctgccttgggatcctgttgatctatgaccttacccccaaccctgtgctctctgaaacatgtgctgtgtccactcagggttaaatggattaagggcggtgcaagatgtgctttggtaaacagatgcttgaaggcagcatgctcgttaagagtcatcaccactccctaatctcaagtacccagggacacaaacactgcggaaggccgcagggtcctctgcctaggaaaaccagagacctttgttcacttgtttatctgctgaccttccctccactattgtcctatgaccctgccaaatccccctctgcgagaaacacccaagaatgatcaataaaaaaaaaaaaaaaaagaaatgctatacgattgaagcaaatatttccagtttaagaccaacaattccttgtaagaaaaatactttttatctcctgctttatcatgtactatatcactcagcatcccatgaaacacagggtcaaatctgtacgagattttttttttttgagacagagtcttgctctgacgcccaggctagagtgcagtggcgcgatctcagctcactgcaagctctgcctcccgggttcacgccattctcctgcctcagcctcctgagtagctaggactactggcgcccgccactatgcccggctaattttttgtatatttagtagagacggggtttcactatgttagccaggatggtctcgatctcctgacctcgtgatccgcccacctcggcctcccaaagtgcttgggattacaggtgtgagccaccgcacccagccacgagattttaatgaataagtatatactgaagaactgtacattttttcttctattcccatgattacactgaaaagccagagggcccgtgcaacttgcaacaacatcctgctggccatgttgtaccgaagtactgcagaccattagaattagtcagatccaactggtggagtgaaaatattcttttagtgaaatattaattttaacttgtttgtataatatttatcacagacccagtgtttcttttttctccctgtcccatttgatggaggcaggaggttactgggatgttagagcacaggcaggaggaaaaaggcatggcaacttagatcataaaaattaaatcttcaccaggcgcggttgctcacgcctataatcccagcactttgggaggctgagaagggtggatcacgaggtcaggagatagagaccatcctggctaacatggtgaaaccctgtctctactaaaaatacaaaaaaattagctgggtgtggtggtgggcgcctgtagacccagctactcaggaggctgaggcaggagaatggcgtgaacctgggaggcagagcttgcagtgagccgagatcgcaccactgcactccagcctgggtgacagagcaagactctgtctcaaaaaaataaaattaagtcttcaaaaaatccccacactcatgagcctcaggactgcgaccactgttagcacacataggatggagatgataagatgccagaacagctctttccctcagaaacctaacagtgtaccctgagacttaacgaatttgagtaacaggttaacagtttcaatttgcaagggagttcacccaagtccacaatggtttcatactgaatttgcccatgattacaaaattcaaagggttcagcagtgctgtcctccaaaaggatatgaaattccctttctccaatttcagaaagaagtgatccgcaaacagctactctagaggctggccatcctcccaacgtctctcattttaggctcccgtgaggtacgtggtggcatgagatcccgacaccaaagcataggaatccctcagtggcataattcccctaaatcttggcctttgaaaaagatcattaacctactgatgtccatatgcaaaggacagaaaaaatgctcccaaacagcaatcctgatactagaatttacctatttggtaaagtaacagaaatatccacacctttcttgttgttgggtcaaaggagtaaaatgagctgatcacgtaagttctaattgttccttgtacagtggttctatggcacttgttcaaagaaattcctactacctagtgtgcagaagactgttaacattagtaaaatgttaacctaagactacttatctttaaatgcctgagggtatatattcaattcataaaaagttcacatatgattctgtggtctccaaacatttgttgtccttcactgatatctgggaagtgagaatttgggagggaccccgccaacctaagtgataaagagtggcttagtgtgtggctgggtgcagtggctcacgctgtaatcccagcactttgggaggctgaggtgggcggatcacaaggtcaggagatcgagaccatcctggctaacacagtgaaaccccgtctgtactgaagatacaaaaaattagctgagtgtgatgtcgggagcctgtagtcccagctactcgggaggctgaggcaggagaatggcgtgaacccgggaggcagagcttgcagtgagccaagatcatgccactgcactccagcctgggcaacagagcgagactccacctcaaaaaaaaaaaaaaaagagtggcttagcgtgcctaaatggtttatggaatcaatagagtatatattgaactccttttttccttcttagagtctggactttttcacatgccaggcagaggatgcctacttgatccgccccccaaaagcactgtgagcactgggtctctaatgagcttccctagcagacaatatatcatatcacaacttgttgcttggggaattgagcccattccatgtgattacatcaggaaagaacatttaaaggcttggttgcatctgctttcctccacaccaactatgactaaataaggctaataaaggatatttaataatcctaattttaaaaatgttattgggtaatgtcaaagcagaattaaattaaggtggaagttggtacatgttctcagaacaaactcagtgtcaacaagatgccactgctcccaaatgatatctttataaaattctacaaatccctaaaatagacttataaaattcttaaaatagacttataaaattctacaaatccctaaaatagtcaagaaaaactacttttccaaacctaagaggaacaataaatgtcaaacaatgggtaaagtcttttgaagagcaacataaatacttgcctagtatgtatcaaggattttcaaactattaacactccaaacagcatgacacacagagagctaaatagaacaagggaggggaaaagtgtcttcaatggactggcatttataaggaaaattgattaatgatagagcaaccattgtagggtagtggaagagatcactaacacttcaatatatgcagaagggacacactgttgtctaactggaaaaagcattgcatcagctcttttccatagacaataatcaatttaatgtagatttaaatgtgaataatataattaaaactgtttcaaaagtcacaggcaaacttttttaaatgcaagagtagggagaattttctcatgtaagagtaagccataaaggatgagactgaaaagttcaaacatactaaaatcaagaaagttaaaagacaaatcacaaagcaggaaaaaaatatgtgacatacatgcaatataaatgaactagtatgcagagtaaaaataaatgaacagtcaggcatgatggctcacacttgtagtcctagctactcaggaagctgaggcaggaggatcatatgaacccaggagttagaggctgcagtaagctatcacaccagcctgggtaacagggcaagactctgtcaataaataagtaataaaatagccaaataaataaaaagtgaacacatgatttaaaaacggaaacacaggccaggcacggtggctcacatctgtaatcccaacactctgggaggccaaggcgggtggatcacctaaggtcaggagttcaagaccagtctggccaacatggtgaaaccccatctctactaaaaatacaaaaattagccaggcatggtggtgggcacctgtaatcccagctacttgggaggctgaggcaggagaactgcttgaacccgggaggtggaggttgcagcgagcccagatcgtgccactgcactccagcctcggcgacagagcgagactccatctcaaaaaaaaaaaaaaaaaaggaaaaataatgaaaacatatttaagagaggatgacacaccatatatatgaaaaaaggtctggctgggcacggtggctcacgcctgtaatcccagaactttggaaggtcgaggcgagcagatcacttgaggttagaagtttgagaccagcctggccaacatggcgaaactctgtctctacaaaaaatacaaaaattagccaggtgtggtggcacgggcctgtaatcctggctactcaggtagccaagacacgaggattgcttgagcatgggaggtggaggttgcagtgagccacgatcgcgccactgcactccagcctgggtgacagagtgagactctgtctcaaaaaaaaaaaggaaaaggtacatctcgctccttccttgatacagccaaatgaaataccaaatagatccaatttcttacatattagaaggacaaaaatcagtcaattagctactcccaagtattgatgaccactgccaatagacaaatagttatgcatgaatggaagaaagatcaactgatacactccattgctatttcctgtatatttgaacttgaccataatctatagcacagtgatttttctccaacatccagagaagttattgtgtatttgtacttagacacagataccaaaacaataggatcagtatttttcacaagagcaaaaaatgaactggaaaaagcccaaacaccaccatcaatggattggatgataaaattggattcccccagcctgtcactatcatgtgaaacacagaggcaaaaccactcaaaaaccttttcattgttaattccactaatactcatgtatttaaagttcaaataaggctcaactaaaagaacatcacatagtgaaatggaagataaaggtataaagaataatcaaataatcaagactgtggccatctatgaagcaggatggagataagccagaggagaacatcaatagactaattaatgactgaccaaagctcacctataaatttatatttttaaatcacttattgaggcaatgattgacatgaaaaagttgtacatatttaatgtatacaactcaatgagtttggggataagtatacacctatgaagccctcagtatcataaggacatagacatattcatcacaaaagtttctttcccccttcattattattactatttgtgtgtctctctatgtgttaagaatacaacataatatctattttagaaattttaagactaggcacagtggctcacacctataaccccagcactttgggaggccaaggtgggaggatcacttgatgccaggaattcatgaccagcctaggcaacatagtgagatcacatctctagaaaaaaatgtaaaaatcttaggtgggtgtggtggcatttgcctgtagtcccaggtacttaagaggctgggacaggaggattgcttgagcccaggagtttgaggctgcagtgagccacgattgtgccattgcactccagcctggataatggggcacgatcccatcttaaaaatgaatacaaatttttaaacatttttaaaaggaatgtttaactataaaatcattgtgttgttagctataggtactatgccatatagtagatcttcaaagctcatttatctgcataactgaagctttgtattcttcagcttcatctccccatttcccccttcccctgcaaattaccattctactctatgcttctatgagtttgattattttagattacatatataagtgagactacaaagaatgtgcctttctgtttggcttatttcactgagcataatgtcccctacgtccatcaatggtgttgtcaatggcaggatttcctttttttaaaggctaaatcatattttattttatgtaaacatcacacattcatctgttgacacacatttaggttgtttacatatcttggctgttgtgaacaatgatgcaatgaacatgggagtgcacatatctcttcaagatgttgatttcaattcctttagataaatatggagaagcagagtgctggatcatgtagcaattccttttctaattttctgataaacatctatgctattatccataatgcctgtatcaatttaaatttaaacttctaccaacagtataccaaggttcccttttctctaaatcctcaccaacacctgtaagactataaatatatgtcttagcagaaaccttggatgtcaagagagtgggacaatacattcaaagtgttaagctaattagcaacacaaaaagatatgaaagtataaaactcatgggtaaaggcaaaagtatagtcaaatccagaatattcttatacataatggtggtacaaacatcactttcaactctagtataaaagctaaaagatgaaagtatttaaagtgactatagctaccataacttgtaaaatggacactgaatattaaaaagatgtaaatcctggccaggcacagtggctaacacctgtaatcccagcactttgggaggctgaggcaggcagatcacctgaggtcgggagttggacaccagcctgtccaaagtgacaaaaccctgtttctactaaaaatacaaaaattagccgggcatggtggtgggcacctgtagtcccagctacttgggaggctgaggcagaagaatcgcttgaacccaggatgcggaggttgcagtgagccaagatcgcaccactgtactccagcctgggcaacagagtgagattccgtcttaaaaaaaaaaaaaaaaaaaaaaaaatctaagcatctacatgaggaaagcaagaaaatatgagcaaattaaacccaaagtaagcacacaacagaagaaatagtaaaaagagaaattaaacaaaaccaaaggtgtttctttgaaaagatcaatatatttgataaatgtatggttaagctaactgaaaaacagagaacagaaattactaatatcacaaatgtaagtgggaaaaataaaaatgaaaaagctatgggcaaaatccaacatgcatttatgataagaaactggagatagactttcctctttttgagaagcagtatttataggaaacctgcagctaatatcatatttaatagtgagaaaatagatgctttcctggtaagatgaggaaatgggcaaagatgtcccctcttaccactcctactcaacagattgtactcaaagtgtaactaatgagaggagaggggaggagaggagagaagagatatagattgggaacaaagaaatatcactgtctttgtcgcatgtgacatgattgtctaagtagaaaatctcaaagaatccacaacaaactcctcaaactagaggttgaggatataatcttaatatacaaaagtcaattgccttcttacagactcacattagtatagtatagactcactgagtcatctgattttcaacaaatgaccaacagcaattcaatgaaaaaagatagcctttttcaacaaacagtgttggaaaaactgaacatccacatgcaaaacacaatgaaaaaaacacaaatctagaaacagacgttacaccttaaacaaaaactggctcaaaatggatcacagaactaaatgtaaaatctaggccaggagcagtggctcatgcctgtaatcccagcactctgggaggccatggcaggaggatagcttgaagtcaggagtttgagaccagcctgggcaactaagtaggaccccatctctacaaaaaatacaaaaattagccaggtgtggtggtgcacgcttgtagtcccacctactcaggaggctgaagtgggaggagtgcttgagcccaggaggttgaggctgcagtgagccaagattgcactactgcactctggcctgggcaagagggagaacttgcctcaaaaaaaaaaaaaaaagtaaagttataggatactaaaagttaatgaagaaaatctaggtgaccctgggtttggtgacaaatgtttagatataagcaaaatccatacaaaataaatcagtaagtttgacttcattaaaatgcaaaagctccttctctatgaaagctctgtgttaagagaatgaaaaagactctagagccttttgcggtagggggacccacttaaggtgggccaatttgcaattaacagcataaagtggttaagtaaaatttataaacaaggaatatgttgcctccagaacatcaaaagaacctagaagatgctgtgggtagtcagagggacaatagctatttcatagtagtgtcagggatggagcggccctccttttaccaaatggtttttaggaacttaaccaaaacataaaggtctcttattttatatatggggcaatggactttttgtaagctctattttttttttcagtatttatgtgtcctgaatgaatgccaaaacaatgtcctcagacaaggctgtcattaatgtaatatcatacctgtgttctagagaaaggtggatgcagttcagattttgcctgcaaagactgtgcaacagcaaggctgttgaggttcccttgggaaactaggtaaagttatataattagcctgtgagatggtgaaatctgtgagatcagctggatggtgtcagtaatttccatgttggatattggtataggggcttaatgggtgggaccacagcattaaggttatggtaatccattgtgggttgccattcattctctccaagtttaagaaaggccaaactgtacttttaaaacgagaagcacggggaataatcacttcctcactaaacaagttttacataatacttttcaacccttcaaggccctgttcaatttatattgagccatcataactaatttaactggggagtaagttccacagggtctcattctgtcaagccagtttgtaagtgccaaagatttaatttaaatttcacttatgactcactggtttagagtttacctgttcattctggcgtattttaggacactgggtgccatgaacatggggaatttaggcacagttatgatggctaagatgagacatacttatttgtcttctattttatattcagtaactcccttaagattatcaggggataccttgcttaaattttagtgggtctcccaggtataaccataatttgagcccttgtattggctaatcctatagtgtgttaattaatacattacataagatgttaaaattaatacagaacctatgatatagaggctcttttatcttttttgccgtctaaattcctttagtctatttggaatttccaattgggtcaaattgtggacctctttttcagcatttttttcttttgttcctttccttcctaacatgtttgttttgtttttgtttttgtccctggatatattttgacagcaaaatcctctctacaggggaggggtgttcttttccctccagagagccacaaatcactattatcaggcttaggggcctgtccctcatggttgctttataaagtttaagcacctgggccttaagctggctttgaatgaaccctttgcaatgctgcagaggaaacatgagtgtgccctataatcctgagggtcagcatccttgctgcaatagagcaacagcagcaacacttaagggtccttgggagccctgtgctattaggagtgtggactcggcccaccatctaacagctgcctttccccctctcttttgtctctttttcaaaaatgactgctctggcaggtagtctttcccatgagcaccttgtatgccaggtcagcagcagtcacagcttcactctaaaacacacagataagtccaggccaagaaacactacccaggaccactttaaggagtatcaaatctcatattcctcttcaaaaaagccaaggaattatcaaaacggccaactccagttggctaaacatagaacccagacttggcagggctcaacatgcagcacagagtagcacaactcaaagtagtagcttcccagaaagcagcagctgaaagtgcatgctggccatcaggcaacagagcaggtagcaattcagtgcaagagaagacagacccatggggtgacagtcaatgtctgaacaccatgctcatggtaacaattcctgtgtcgttccaatgttgacactaataacagcgtggagaacagacaccaaagggtatgaaaagactcactactgtgatcattgaggtcttggggaaagcagggcaggctgcccaagcaggtgtgacatagcttcagagagcaaagaaagcctcctggcctgggtttttattgtagtttgggggtggggctacaagagagtacctgctcaagggcaggagcttctgtggtttgaatttcctgctcccagactttttcagcttgcccaggtgtgcagcacgaggagaagagagaagggtgacgcttatgatgtgcacagccaaaatcaaaacatgcagagtccaactactcattacagaaccaacatgagtatgaaaaacatgcatttgcaattgcttatttttataaaaagaaacactgacagtatgcttaagaaattattaaaaggccaggcacagtggtttatacctataacaccagtgctttgacaggctgaggcaggaggattgcctgagcccaggagttcaagactagcctgagcaacatagtaagactccatcactacaaaaaatttaaaaattagctgggagtggcagcacacacctgtagtcccagctactgaagaggctgaggtgggaagatcacttgagcccaggaggttgaggctgcaatgagctatcatcatgtcattgtactccagcctgggcaacagaacaagaccccatctcaaaaaaaataaaaaattatcaaaagtgagtatttggggggtggctagagcaagtgccctggctggactggaccagaatatgctggcagtgagtcttttcaagttagactcaactattgtggatttttttctaacttccacatgcatgatttctttaaaataaacagctaaatttaaataagccatattttactacttaataatcttcatttttaatcaacttacttttgctttttaaattttgattaaaattttctacgtatgaaacaatcctaagacttaatccaggccgggtgcgatggctcacgcctgtaatcctagcactttgggagaccaaggcaggtggatcgcgagatcaggaaatcgagaccatcctggccaacatggtgaaacctcgtctctactaaaatacaaaaaaattagccgggcgtggtggtgcacgcatgtagtcccagctactcgcgaggctgaggcaggggaattgcttgaacctgggagtaggagactgcagtgagctgagattgtgccactgcaccccagcctggtgacagagtgagactctgtctcaaaaaaaaagactgaatccagctgggtgtggtggctcatactagggaattttggtaagccaagttgagaggattgcttgaagccaggagttcaagaccaatctggtcaagagagtgagaccctgtctctacaaaaaagaatatatatatataattaggtgggcatggtggctcatgtctgtaattctagttacttgggaggcagaggtgaaaggagttcagggctgtagtgagttatgattgtgccactgtactctaactaggacaacagagcgagaccctgttttttaaaaaaaaaacaaacaaaaacttaatactttaagcactgacaattacaaaagtgaaaaactttcaaatctctttctaactataatgacaaggtgcattattatgtgtcctaccatctcacactgggaggtgctattgggaaggagtagcatattataatgcattagcattttatcttaagtatgttaggattttcaaatatatatataagctttgagtagttattctaccaaataaagaagttcaggccaggtgcagtggctcacgcctgtaatcccagcactttgggaggccgaggcgggtggatcatgaggtcaggagatcaagaccatcctcgctaacacggtgaaaccccgtctctactaaaaatacaaaaaattatccgggcgtggtggcgagcgcctgtagtcccagctcctcaggaggctgaggcaggagaatggcgtgaacctgggaggcagagcttgcggtgagccgagatcgcgccactgcactctagcctgggcgacagagcaagactccgtctcaaaaaaaaaaaaaaaagttcaattgcattttcctttcagttccagtggaaattcatttgcaataggaatcatatggactttgaggttttttcgtttttgtttttgtttcttgagacagggttttaatctgtcgcccaggctgaatgaagcacactgactcaattttggctcactgccacctctgcctcccaggctcaagggatcctcccatctcagcctcctgagtagctgggactacacccagctaaaattaccacacttggctaatttttttttttttttgtagagacagggtttcgccatgttgcccacgctagtctcaaactcctgggctcaagcaatccacctgcctcagcctcccaaagtgctgggattacaggcatgagccacgatgcctggcctcttttaaatttccaagtactctatgacatgcacatacaaaaaccgatctaaaaatgaaaaatgtacctgagaatgtaaatacattcatctcttatcttgaggttctcttgcctaaaagaaacaaatattctgtttggttccagagttttctttttttttgttttgagatggagtcctgctctgttgcccaggctggattgcagtgcacaatctcggttcactgcaacctcccctgcaacccggggttcaagcaattctcctgcctcagcctcccgagtagctgggattacagccacccaccaaaaattacatgtctggttaatttttatatttttagtagcgacagggtttcaccaagttggccaggctggtctcgaacttctgacctcaagtgatccttctgcctcagcctcccaaagcgctgaaattacaggcgtgagccaccacacccggcctggtttcagaattttcttgccttagttgcatcatacctttcaatcgacttacattttcaaacccaagaaacaaaatttaacacactcacatatggaataacattaaaaagtgttaacagaaactagaattcagctgctgtaatagtcagcaaataaaggaatccaaagggaaaaaaaaacaccagcctggacacagtgaggatctacaaaaaatttacaaattcaggtgtgacagtgcacacctgtagtcctaggtacttgggaagctgaggtgggaggatcatttgagccaagaaaggtgttcgaggttacagttagctatgatcacaccactgcactctagtctgggtgacagagtgagacactgacttaaaaaaaaaaaaaagggaaggaaggaaggggaaagaaagaaaggaggaaggaaaggaagaaggaaaggaaaggaagaaggaaaggaaaggaagaaggaaaggaaagggaaaggaaagccaagccacatctgtaatcccagcactttgagaggccaaggtgggaggactgtttgaggccagcagtttgagaccagcctggccaacaaagtgagaacccacctctaaaatacacacacacacacacaaacacacacacacacacacacacacacacgctccctctccctctccctctctctctccctctccctctcaagtcagctcagactagcagactgcttctccacaattcagaaggaaaacccacactcagaaagctaaacacatacacaagcttggggcccacattcttgctgttgggcaacaacctttagagtgagacagtccctggtgacagagggcaggggcacctgaggagccaaaggaatgaactcagcgagctccacacattccctcacccctggtgacagggaaatcgccccttcaattgttgtaagtgaggaaactctcaactggactgagattaaggttctgacccaaatgaactccccagttcattcatcctgtgtccaggagacagatctcctggcctttacagactttctcactatagaaaaattacactgagtgcacctacacaacagatgcaaaactcaaacctaatgtctaaaaataggcccaaggaaaccacaattatgccctcaggaagggcatcactggattcagccaatcccccaacgtgcattcagatccccagctttccagtgctcagcagcttctctcagtacaaagggctccttccacagtaggtatgagcaggtaggacacctgcaggggaggctccctaggaagaaacaactgggccttcgattacatcccttgggagacccaagggttggtcttagagcttggagtcactgacctgagtcctctttgctctccagtcaagtgacctggaccactactgatatttacatgagacaaaccctgtgtttgaagaaatcaaaggggaggctgaggcaggtggataacctgagcccagaatggaattccatttgaaatcaccgaaaaggaaagaacagacctgaggaacttgctatacattctcagaagaaaaaaagagaaacaaaaatttttaataaatgcaatatcatactgggatatttcattattattattttctgtttttgagacaaggtgtgagaccttgctcagcctggagtgcagtggcatgatcaaggctcaaagcagcctcaacttcccaggctcaagcaatcctcccgcctcggcctcccaagtagctgggactacaagtgcaggccattacgcccagctaattttttttttttttttttttttttctagtagagatgaggtctctctatgtcacctaggctggtcttgaactcctgagctcaagcgatcctcctgactcagcctcccaaagtgctgagattacaggcgtgagccaacgctcctagcttgatattttattattttctgaaacccatctctttcttgcctctttggaaatattttacatccactctaaaggtttattttattttatttttttatttttttgagacagagtctcactctgtcgccgaggctgtagtgcagtggcgcaatctcatctcaactgcaacctctgcctcccgggttcaagtgattctcctgcctcagcctcctgagtagccgtgattacagatgtgcaccaccacgcccggctaattttttatatttttagtagagacggggtttcgccatgttggctgggctgtaggtctcctaattacgtatattttacattttttgagaatcaattaagtgagtaaatcttttcaaggtgataagcccagggaggggaagtgctgcgctggaaaggacagatctcccagaaaagtttccaaaaaggagactcaacccaaaggagttcccataggatgtcaggtcccaggagagatactggcaagagaggcacaagcattttacacgaggtagcttcaagtccttctcctctgttttcctctcatataaataccccaaagcatacgttaaatctttttaaaagaaccatccattcctctgtacaaaaaggataattaaaatactgcgtctggttgaaataacgacgttgtgaactggagagaagacattggcatttgaaagagatctagaaatttagggatttaatcccagctctgggaagagccaggctggaggacacggtcgtgggtttgagatctggcttcccatacacttggaaaccttgagaaacgagtcctcccttgggaagaaaagagggactgaggaccccacacaacactgctcctcccacgcacgaaccccacgaccgagacgggattccctccatgaccctcccgtgccccagcacaatctggggagacgcgaggctgcgggctcggagctgcccagagagggctccgggactggggccgcagtcgccgcgcagggacttgacaagacgtccggggtcccggctgccggcccagccccatcctgcggccaaagagaccgagggccgagctgcgccaggaggactcgggtccacagacccgggagacaacggcggggaggcctgggtcccaccacagccagatccggccggtttcaacccgcccctctctcccatctcaagacccccagccccgcacacttaccatttcccagactctgggatgtcctggtgttctgtttacctctcccgcggccagcacaggtcctacctccacctgaggcccttcctccacctgagggccttctggggtgaggagaccccagagcggagcgcagcggctggtagccacgccctcgccgtttgcgcagcgcccctccgcccgccttcccggcggcgcccctgattggacattgcactcttggacccgccttcgttgcctgagtgacagctagtagggaagtcgcgtctctaagcaacctgcattcgtccggggtcaggaatctgttcccctgccacggatatttgcgtctaagcagaatttgttaacgtacccggggtcgggcactggtgtcttcctgcagctccttctgagcgcggagacacaagcgtgcacagcgcaggaaattccaggctcagtttccagaaaaaggctctttgtccacagcgaaaaaggacgcccgggccatgccagactagaacggaagggtcagacgctcccagacttagcataaggctgcgaggccattcatggatttctgactcttgtttacaaatacagacacttagagtgacagagtgacctcatcatacctaacaaagagtgactacgttttaatctttgacaactgacagggtttaggccgtcacccatcccttccctccccccacactttgctctagtgggaagtttggaccccacagccctagtctgagagaaggagttcctttttttttttttttcggtagagatggcggtggtggggtggtctcactatgttgcacaggctagtctcgaactcctgggctcaggtgatgctccttggcttcccaaagtgttgggattacaggcatgaaccaccgtgcccagtgaggaattattcagttaaacccaaagccatgagatgtgttcagtaaaactgaacactggaaggatatttatttcggaccagtttttgactatgtccctagagaacttttgtggatcctttatgtttgtttggtttgtggtttttgtttttgagacagggcccttctttgtccctcaggctggaatgcagtggtgcaatcagagccccctgcagcctcgaccttctgggctcaagcaatcctcccacctcagccacctgagtagctggaacctcaggcacgtgccaccatgcttgactaatttctttctttctttttatttttattttgtagaaacagcatctcactatctcacccaggctgatcttgaactcctgggctcaagtgatctgctggcctcagcctcccaaagtgttaggattacaggcatgagccactgcacccagcccctagagaattttgaaatgtaaatggctatgatatcgataaggcaattaattccattttcactgagattatttaaaaaaccacaaaagattatgtaaatttggcatgtactaggaaactcaatatacttaagatattggatcaaacctactaatgggcagggcatgatggctcacacctgtagttccagcactttaggaaacttaggtgggagggctgcttgagcccaggagtttgagatcagcctgggcaacatagtgaggcccccccctcccccatctctaagaaaattttttaaaaattagcagggcatggtggtgcacacctgtagtcccagctactggggaggctgaggcccgaggattgtttgaacccaggaggtcaaggctacagtcaactgtgatcctgcattccagcctgggtgacagagtgagaccctgtcagaaggaaggaaggaaggaagggagggagggaaggaaggaaggagggaaggagggaaggagggaaggagggaaggagggaaggagggaaggaaggaaagaaggaaggaaggaaggaaaaaaaaaggaaacccctgtagcctttggctgtcactgtcctatcttcccatcttcctcctccaagcctctgtcctaagcaaccattaatttactttcagttgctatatagctttcccattgtagacttggaatggaatcatatactatgtgttctttgtgagattaacttcattcacttagcataactgtttcaagggacatttacattgaagtttgtatcaatacttcatttgttgtttacagtaaaacaatatttcattgtaccaatatagcccattttgtttatccattcatccattaataggcatttggtttgtatccaccttttagttgttattaataaggttgctataaacatccatgtacaagtttttctgtagacataggatttcatttgtcttgggaatacacttaggaatggaatcgatgggttacatggtaattctatctttaatctttgaagagctgccagactcttctcctctcctttgggaaattctattacacacatattggtcaactaaatagtgtcctgcatatttctcaggctctgttcatttttctgttttctgtttttgtttttttaagatgtaatcttgttatgttacccaggctggactgcttcagcctcccaagtaagtgggactacaggtgtgcactagcatgcccagcttaaagaaataatttctattttgatatgacacctgcagatccccctccctcccccaaaaaatctttttttttttttttttttttttgagacggagtttcactcttgttgcctaggctggagtgcagtggcacagtctcggctcactgcaacctctgcctcccaggtacaagtgattctcctggctcagcttcccgagtagctgggattacaggcacctgccaccatgcccagctaatttttttgtattctttatagagacagggtttcaccatgttggccaggctggacttgaactcctgacctcaggtgatccgcccacctcggcctcccaaagtgctgggattacaggcctgggccaccacgcctggcccgaaaaatcttattctccagttatctcctgaaaaacagtaggcctacagtctacactatatcttgattaaattcctagatctcttcccaattgattttcacttcttttttgaaacagactctcaccctgtcacccaggctggactgcagtggcgaaatctcagctcactgcaaactccacctcctgagttcaagcgattctcctgcctcagcctcctgagtagctggggactacaggtgtccgtcaccactccagctaatttttgtatttttagtagagaccgggtttcaccatgttggccaggctggtctcgaactcctgatcataggttcacgccattctcctgcctcagcctcccgagtagctgggactacaggcgcctgtcaccacacccggctaattttttttgtatttttagcagagctggggtttcactgtgttagccaggatggtctcgatctcctgaccttgtgatccgcccccccttggcctcccaaagtgctgggattacaggcgtgagccaccacgcccggcccactcctccactcttaaccactattctcttttacaattttatacctttgcctttttcagaatgtcatataaatggaacacaaagtagtcttattagtcctgttttcaaatttgacgacttatttgtaaacattgatacagtacctgcagtgttctgagtttttttgtttttttttttttttgagacagaatttcactcttgttgccccagctggagtgcagtggcgccatctcagctcaccacaacctccgcctcctgggttcaagcaattctccggcttcagcctcccgagtagctgggattacaagcatgcaccatcacacccggctaattttgtatttttagtagaaacggggtttctccatgttggtgaacctggtctcaaactcccgacctcaggtgatccgcccgcttcagcctctcaaagtgctaggattacgggtgtgaaccacagtgccctgccaagttttctatttttgacagtgcccagtacaggtggtggcacacattcgaacttcaaaactgagagattacggggctgggcacgatggctcatgcctgtaatcccagcactttgcttcagcctccccagtagctggaattgcaggcatgtgcaattttgtatttttagtagagatggggtttctccatgttggtcaggctggtctcaaactcctgaccacgtgatccgcccgcctcggcctaccaaaatgctgggattacaggcgtgagccactgcgcccggtctatattctggttattaattccttgtcagatgggtagtctgcaaatattttctcccattctgtagcttgtcttttcactttgttgtacagaagctctttacttaatgtgacccctttatctatttttgctttggttgcctgtgcttgtagggtattactcaagaaatctttgcccactccaatgttctggagaatttccctatattttcttttagtagtttcatagtttaaggtcttagatttgagtctttaactgattttgatttgatttttgtatatggtgagagagaggtctgtttcattattttgcatatggttatccagttttcccagtctctttattgaagagactgtccttttcccaatgtatgttcttggcacctttgtcaaaaatgagttcaccatagatgtatggatttatctctggcgtctctattcaggagtttaagaccagcctggccaacatggtgaaaccctgtctctaccaaaaatacaaaaaaattaactgggcacagttgtgtgcacctgtagtctcagctactcgggaggctgaggcaggagaaccgcttgaacctgggaagcggaggttgcagtgagccgagatcacgccactgcactccagcctgggtgacagagtgagattccatctaaaaaaaaaaaagacggagagattccattagcactgtgggctataggaatgtaggcaagaccttgtgctccctatacttcaaatttttcattcataagataggacgtatggttggatggggctagtcaaatgaaatactaatgattatatcacattaatttccaatgacatatagtgagatgcatatatgtcattgaaatgttggacaaaaattaggttttaattgctctctagtaaaacacaaagctgttaactttttttttttccatcttccctaacgtgtgctggaggtctaccatatggaaatgatacctgcggacagtttcatgggcttttgggtctttgtggatcattgaaacaaaaattacccagctacttctcttgtttaaaaaagcattaaagattgaaaatgtcaaatatactttttttttttttggtagagacagagtctcgctctgtcgcctaggctggagtgcagtggcaaactcggctcactgcaacctccgtctcctgggttcaagcaattctcctgcctcagcctcccaagcagctgggactacaggtgcacaccgccacatccagctaatttcttttgtattttagtagagacggggtttcaccatgttgcccaggctggtctcaaactcctcagcccaggcaatcaccagcctcagcctcccaaagtgctaggattacaggcgtgagccaccgccgccagacatataccttatttttaactaaattgggatgaaaatcaaaataataccctctgtctgtagcttgctgcaattctaacttggataattgccctctaaacatccatagttcttttggatttgtcaactgggaaatcactgtggatttggctagatatcaccctgttcatcggaaaaacctgagatggtttgcactatgcagatgactgttacctttctccaaactgggaagaactccatggttttctgattacaatttgtgtcattcagtctccagtaaatgcaaaattataatgtcaaatagatgagatcaatggaatagaattgaaatcccagaaataaactcatatatatatatacatacatatatatatatacatacatatatatatatatgtatatatatatatatatatactcaaatgactttcaaaatgctgccaagaatatgcaaagactattgttttcataaattggtgctgagacaactggatagccacatgcaaaagaatgaagttggacccctacatcacccaatatatggtaattcactgaaatagatcacagaccaaaacataagaggtgaaattataataatcctaggaaaaaaaggtgggaaatattgataatcttggatctggcaaagaattcttacatatgcaggccgggtgcagtgtctcatgcttgttttcccagcactctgggaggccgagggggccggacagcctgtggtcaggagtttgagaccagtctggccaacgtggtgaaaccccatctgtactaaaaatacaaaaaattagcctggcatagtggtgcatgcctgtaatcccagctactcaggaggctgaggcaggagaaacacttgaacccgggggggtggaggttgcagtgaactgagatcatgccacttcactctagcccggatgacagagtgagactccatctcaaaaaataaaaaagaatccttacatatgcagccaagtgtggtggctcatgcgtgtaatcccagtactttgggaggccaaagtgggaagatcacttgaggtcaggagtttgagaccagcctgggccacatagtgagaccctcgtctctattcaaaaaacaaaaggaaaaaagaattcttacatatgacagcaaaagcaaaaattgatgtgtgtgtgcaatagaatacacacacacacatatatatacacacacacacataatttgggcctcataaaagtaatagcttttgtgcttcatagaacactatcaatatgttgaaccaaccctgcacccctgggataaatcccacttggtcacgatgcattacatttttaatgtgttgttgaatttgcaaatattataatcctatatctggaaaaaactaaagactccaccaaccagcactttgggaggccgaggcaggtggatcacgaggtcaggagtttgagaccagcctggccaatatggtgaaaccctgtctctaccaaaaatacaaaaattagctggtcatggtggcatgcacctgtactcccagctactcaggaggctgaggcagaagaatcgcttgaacccaggaggtgaggttgcagtgagctgagatcgtaccactgcacttcagcctgggcgacagagtgagactctgtctcaaaaaaaaaaaaaaaaaaaaagactccaccgaaaaactattagaaatgataacccaattcagtaaagttccaggatacaaaatcaacatacaaaaatcagtagcatttctatatgccaacagcaaacaatctaaaaaagaagtcaataaagtaatcccatttataatagctacaattaaatacctaggaattaacttacccaaagaagtgaacaatacctacaatgaaaactataagacattgatgcaagaaattgaagaggacaaaaaaatgaaaagatactcatgttcatgcattggaagaatcactattttttttttttttttttttttgagacggagtcttgctctgtcgcccaggctggagtgcagtggcgcgatctcggctcactgcaggctctgccccccggggttcacgccattctcctgcctcagcctcccaagtagctgggaccacaggcgcccgccacctcgcccggctaattttttgtatttttagtagagacggggtttcaccgtgttagccaggatggtctcgatctcctgacctcgtgatccgcccgcttcggcctcccaaagtgctgggattataggcgagtcaccgcgcccggcctagaatcactattgttaaaatgtccatactaaccaaagaaatctagagatttaatgcaatcccaatcaagataccaatgacactcttcacacaaatagaaaaaaacatcctaagatgtatatggaaccaaagaagacccagaatagccaaagctatcctaagcaaaaagtacaaaactggaggaatcatattacctgactttaaattatttaaatatgactataaatcatattatctaactttagagctacagtaaccataatggcatggtagtggaataaaaacagacacaaagatcagtggaactgaatagagacgccagagataaatccatacatctatggtgaactcatttttgacaaaggtgccaagaacatacattgggaaaaggacagtctcttcgataaagagactgggaaaactggataaccatatgcaaaataatgaaacagacctctctctctcaccatatacaaaaatcaaatcaaaatcagttaaagactcaaatctaagaccttaaactatgaaactactaaaagaaaatatagggaaattctccagaacattggagtgggcaaagatttcttgagtaataccctacaagcacaggcaaccaaagcaaaaatagataaaggggtcacattaagtaaagagcttctgtacaacaaagtgaaaagacaagctacagaatgggagaaaatatttgcagactacccatctgacaaggaattaataaccagaatatagaccgggcgcagtggctcacgcctgtaatcccagcactttgataggccgaggcgggcggatcacgtggtcaggagtttgagaccagcctgaccaacatggagaaaccccatctctactaaaaatacaaaattagcggggcatgatggcacatgcctgcaattccagctactggggaggctgaagcaggagaattgcttgaacccgcgaggcggaggttgcggtgagctgagatcgcaccattgcactacagcctgggcaacaagagcaaaactccatctcaaaaaaacagaaacaaaaacaaaataaaaaaaaaccccagaatatataaggagctccaaaaaaatctatagaaaaaatctaataggccgggcgcagtggctcacgcctgtaatcccaagcactttgggaggccaagacaggcggatcacgaggtcaggggatcgagaccatcctggctaacacggtgaaaccccgtctcttctaaaaatacaaaaaaaaaaaaaattagctgggcgtggtggcgggtgcctgtagtcccagctactcaggaggctgaggcaggagaatggcgtgaacccaggaggcagagcttgcagtgagccaagatcacaccactgcactccagcctgggcgacagagcgagactccgtctcaaaaaaaaaaaaaaaaaaaaaaaaaaaaaaaaaaatctaataatcggattaaaaataggcaaaaaatctgaaaagacatttctcaaaagaaggcatgcaaatggcaaaccgttatatgaaaaggccaacatcactgatcatcagagaaatgcaaatcaaaactattatacaatgagatatcatctcacccctgttaaaatggcttttatccaaaagtcaggcagtaacaaatgctggagaggatgtggagaaaagggaacctttgtacactgttggtgggaatgtaaattagtacaaccactatagagaacagtttggaggttccacacacacaaaaaaaataaaaatagagctgccatttgatccagcaaccccacttttaggtaaataccccaaagaaaggaaatccatgtattgaagagagatatctgcactcctatgtttattgcagcattattcacaatccccaagatttagaagcaacctaactgtccctcaacagatgaatggattaaaaaaaaaatgttccaaatacacaatggagtactattcagccataaaaaagaatgagatcctgtcatttgcaacaatttggatggaattagaggtcattatgttaagcgaaataagccaggcacagaaagacaaacttcacatgttctcacttatttttgggagcaaaaaattaaaacaattgacctcatggagatagagagtagaaggatggttaccagaggctggaaagggtagtgcgggggttgggggaaggggaagtgaagatggttaatggccacaaaaaatagaatgaatgagacctagtatttgctagcataacagggtgattatagtaaaaaataatttggttgcacatttttaaataactaaaagagtataatcggcttgtttgtaacacaaaggataaatgcttgagttgatggattccccatttaccatgatgtgattattaggcattgcatgcttacatcaaaatatctcatgtaactcataaatatatacacctactatgtacccacaacaaaacttaaaattaaaaatgtaaacattgcctggtctctgtgaacctacggggtcacagttctgagtgtcctggcagcatgatgccaagccactgtcctctggagaatatctgactctcctgatccagtatggccttgcctccagggcccttttgctgtggatttactcctcaaagagtcagtcatcaaggggttcgctttatctggaaactcttgtctggcattccctgcgcgcacacctatgtccccgttcagaagcttcttcggtaaacgccagtgtccggtctgagggcctttatatctagcatataaagttctggtataatgcaaatgtctctggcaggacagtttcagggacaaaagtggaagctggatcgctcagctacctgacctccgtctgagatgtgactcaggcaacagggggtggaacctcacaaactgtccaattggagacgccgccggagcggtgggtggggccgccctgtacaaaggcgcgtggatacggtggcgcgatttccagtttgtgtctctcctgcctcgaacgtcgctaggtggctctgccgcagcctctgtcgctctgggacccgcactggcagagggagtcgtagttagggggtggggacaccgcggaagcccggaaatggtgactgtgcggggcctggaatcccgagacctgaagagctgctggccggaaccggctgtcgcgggaaccgggcctgcccgcggccactcctgggtctgtgaacccgagtccccctggcgtagctcggccctcggcctcctcccgccgcagagtgaagctgggccggcagccaggatcccgggagtcctgtcctgtccccgcgcggctactgaggcccgggtcccggagccctgtgtgggcagctccatgcccgtagccccgcgtcttccaagattgtgtggggatcacgggagggtcataggagagaaggaatcccggctcgagtgtggcgttcgtgcgtgggaggagcggtggtccgtggggtccccagtctcttctttttccccagggggaccggtttgccccttaattttacaaacgtgtgaaaacaggatctcaaatccacgaccccgttttccagcctagctcttcctaggactgacaggaaatccctaaatttgccaattccttctttcattccaaatgaagctttccctctccaattcataatattattatttgccctgttaaatacaatttgtaggaagccattggtttagactgagctcctgcactagacccaacagaccaaaccaaaatgagttacccacggggacgttcctcgctaccaagctgaaactaagttgtttatctgaccttacaaattatcaggagagaaagagatgctggtcaaatccccaacaggccagttttagccaacatgataaagaaagtcccctctgctttaacttttaccagaaaagcaactttgaaagttcccgtctttcaactgggcgtgatggctcacgcctgtaatcccagcactttgggaggccgaggtgggtggatcatttgaggtcaggagttcgagaccagcctggcgaacatggtgaaaccctcgtctctactaaaaatacaaaaattagctgcatgatggcctgtgcttgtagtcccagctactcagggggctgaggtgggaggctcacttaagcccaagccctggaggtcgaggctgcggtgagctatgatctcgccactgcgctacagcctgggtgacagagggagaccctgtctcaaaaaaataaacatcaatagcggttgaaagccccatgactggggagcagcagccagagactagtgacttcaagctaagaccactcttgagcctgcaaagggaggtcattgaaagcccagatgggtcttcctggggagccttccccaaaagtgtcctacttgctctcacccaccaaggaaagagctctttatacagagagaagctacagagcactggaatgctgggaaccgcacgcggttttaggagaaccgggagggttttaattgtctaggttgtaattgtagtttccttgggtctacttttagacattaggtttgagttttgctttcacattagggtacactcgtggtgtaatttttccatattgaaaaagtctgtgaaagttacaagttctgtctcctggacatggtgttaatgactttgggagttcatttgtgtcagaaccttcatctgaatccagctgacagtttcgtcacttacgagaaccagtgggaaggggcattctctgctcccggagttcattcctgtggctgctcaggtgtccctgctgtcaccagggactattccactctagggactataccctaacagggagagagtgtggactccaagctttggtatgtgtttaaccttctggatgttggtttttcttctgaattgcggagaagcaggctgcttatctgagctgattcaatgtttgtgtttctttcctttggattcctttttctattgaatattgcagcactttaactccagtttcctttaacattttgtaattttattccctgtatgagtctgtaggatttttagtttgttggtctttgaaaatttaagttgattgagaaatatgatgtaagagaagcaaatcctggaaccaaatagaatttttattcctttcaggcaaaagaagctcatggtgtgagatggatatgtttaacttctcaggtgcatttttatttttacattagtttgtgtgtgtgcatatccctagaaaactttcaaacttcaaaggctctactattcccagggcaaatggattcctgttttaattgatacgaggaaaactactcctcaaagcttgtgtaatctttgaaaaattctactacatttaatggttatatccaaaccctaatgtattataatatgctactctttttttgagactgagtcttgctctgttgcccaggctggagtgcagtggcgccatctcggctcactgcaagctccacctcccgggttcacgccattctcctgcctcagcctcccgagtagctgggactacaggtgcccatcaccacgcctggctaatttttttgtatttttagtagagctggggtttcaccatgttagccaggatggtctcgatctcctgacctcgcgatccgcccgcctcggcctcccaaagtgctgggattacaggcgtgagccaccgcgcccaatctataatatgctactctttcctgaaaatacccctcagtgtgagatacagtggacagacatgctatgatgcagattctcttaagatttgaaattttacatttcgtatagtttacacttttaaaagtgtataaaggattaaatcttaatgaagacaacttaaaatttaaaaaaaactacattatttaaagactttaatagtaaaatatagtgcagataaatatcttcgttcattttatttttttattttttattttttttgagacggagttttactcttgttgcccaggctggagtgcaatggcacaatcttggctcacagcaacctccacctcccaggttcaagtgattctcctgcctcagcctcccgagtagctgggattacaggcatgtgccaccatgcccagctaatctttttgtatttttagtagagatggggtttctccatgttggtcaggctggtctcgaactcctgacctcaggtgatctgcctgcctcggcctcccaaagtgctgggattacaggcgtgagccaccgtgcccggcctttttaatgtatatttttagacagggtcttgctctgtcacccaggatggagtacagtggcacgatcgatcatagctcactgcagcctcagcctcccctgctcaagtgatcctcccaactcagcctcctgagtagctggaactacaggcacataccaccatgcctggctaatttttgtattttttgtagaggcagggtttcaccaaccggcagggttgcccgggctggtcttgaactcttgagttcaagtgatcctcctagctcggcctcccaaagtgctgggattacaagtgtgagccactgcaccaggcctccattcattttagagagataatacatgtgaaggttaaaaaaaaaaatctatgagacaggaaaatctaacataagactcactgtcaagcatatcctggttcattccaggattcttgctccagccaccccgcccttcgtaaaaacttttggtaattccttgtgcatcctattagtgtttctttattaaaacaagcaattgcaggccaggcgcggtggctcacacctgtattcccagcactttgggaggccgaggcaggcggattacctgaggtctggagttcgagaccagcctgaccaacatggagaacccttgtctctactaaaaatacaaaattagctgagcgtggtggcgggtgcctgtagtcccagctactcaggaggcgggcgcctgtagtcccagctactcgggaggctgaggcaggagaatcactagaacccaggagactgaggttgtggtaagctgagattacgctattgcactccagcctgggcaacaagagtgaaactccgtctcacacaacaacaacaacaaaaacaagcaattgcaaatgcatgtttttcttatccatgtttgctcttgtaatgagtagttggactccaccctttctggtatttgactgttggcagattcagtgtcaacccccctcttctttctaacagctgcccactgtcaatggaatcaccaaactctcaaatattttaaggctttattctgagtcagtatgagtgaccacggcccagaaaacgcagtctcaagaagtcctgagaaagtgcaccagtggcagccaggttacagttatttggtatttttgagacagggtctcactctgtcgcccaggctggagtgcagtggcacaatctcagctcactgcaacctcagcctcccaggttcaagcaattgttgtgcctcagcctcctaagtagctgggattacaggcctgcgtcaccatgcctggctaaattttttgtatttttagtagagatggggttttgccctgttggccaggctggtcttgaactcctggcctcaagtgatctgctggcctcagccttccaaagtgctgggattacaggcacgagccacagcacccagctacagtttggttttatgcattttagaaagacaggagttgcaggcagacataaatcagtacatggaaggtaggcattgatttggcctgaaaaggtagaatatcttgaagcgggggcttacaggttataggtagactcagaggttctttgatttacagttggctaaaggagtaaacatttggagtcattagataagaatgaatgtttgggccgggcgcggtggcttatgcctgtaatcgcagcactatgggaggccgaggcgggtggatcacctgaggtcaggagttcgagaccagcctggccaacatggagaaaccctgtctctactaaaaatataaaattagccaagcgtggtggtggcgcctgtaatcccagctactcgggaagctgaggcaggagaatcacttgaacctgggaggcggaggttgtggtgagatcatgccatcgcactccagcctgggcaataagagcgaaactttgtctcaaaaaaaaaaaaggaatgtttaaggaagacagctgggctcaggagcctataatcccagcactttgggaggctgtggcacacagattgcattaggctggggacagtggcttatgcctgtaatcccaacactctgggagcccaaggcaggtggattacttgaggccaggagttcaagaccatcctggccaacatggtgaaaccctgtctctactaaaaatacaaaaattagctaggtgtggtgtgtgtgcctgtggtcccaactatttgggaggctgaggcagaagaatcccttgagcccgggaggtggaggttgcagtaagctgagattgcgccactgcactccagcctgggtgacagaacgagactccatctaaaaaaaaaagtaaaaatgaggtcgggcgcagcagctcacgcctgtaatcccagcacgttgggaggccgaggagggcggatcatgaggtcaggagatcgagaccatcctggctaacacggtgaaaccccgtctctactaaaaatacaaaaaattagctggacgtggtggcgggcgcctgtagtcccagctacgcaggaggctgaggcaggagaatggcgtaaacctgggaggtggagcttgcagtgagccaagactgcaccactgcactctagcctgggcgacagagtgagactccatctcaaaaaaaaaaaaaaaaaaaaaaagtaaaaacgattagctgggtgtggcagcatatgcctatattccccactacatggatcacttgagcctgggaggtccaagctgtggtgagcagtgattatgtcactgtactccagcctgggtgacaaagcaagagaccctgtctcaaaaaaaaaaaaaaaaagataagaaaatctgttaaccaatacactgggtcggaatgacctagagtttgtgacttaacccttggagagcatggccttaggtcttatttataatttggtatcttattgtcataaagagttttgttagttttatggtctctattttaacattaatgctggtcagttgtgcctaaactccaaaagggaggggttataacagggtgtgtccgacctcccttcccatggctgggaattcagtttttattgtttttgttctttcaagacagggtctcactctgttaaccaggctggagtgcagtggcacagtcatattatagcttattgcagccttgaactcctgggctcaagctatcctcctacctcagcctcctgagtagctgggactacaggtgcatgccaccatgcccagttaatttttactttctttgtggagatggggtctcactgtgttgcccaggctgttctcaaactcctggcctcaagccatcctcagtcccaaaatgctgggattacaggtgtgagccactgcgcctggcctgggaattcagtgtttagggttgttatggggttcccttggccaagaaggggtctgttcagtcaggagggtgctttggattttattttttgtttacaatacctggacaagctgagaaagctgaggcgttccctccttgggccttgctggagagtcccacctaagaagcttttcccctcgaggggaaatgaactctcctactgccccacccccaatcacagtaaacacccagtccaggctcctttccttactctctcaagccattttgcctgcttgaggggcctggcctgcttttctcagagacctcaatcatcttagtaattaaaccttttcataccctctcagcatgtgtgcaccataaccacactggcatcgctgtcaacattggaactgcacctctggggtgaccatggcaactggtgccgtgcacaggatgcctagacttttatcaccttatcagtctgtgttctcttgttggaattactaactcgctctgccaggtggtggctggcatgtggggtgagcgctgctggctggaggagctggtgctctgagtgtgctgctctgtgttgcatggtgagccctgccgggcctgggttctacattccgctgacttgagttggcagtttggatagttccttggcatttgggagcaggagtttgggattgaatccctcctgaaagctctcctgagtgcatgtcttggccaggacctatctgtgtatttagattgaaccaatacttcctttcacaagcaaccacatctacaattctaatcatagctgttattatcaatataatgtactctggacaatgaaaaccacaaaaatactaacccaagcagcattcctaacagttaccatagctcttgtgataaaattaggaatagccccttctacttcgttttttttctttttgacatggaatcttcctctgttgcccaggctggagtgcagtggcatggagcgatcttggctcactgcaacctctgcctccgggttcaagcgattctcctgtctctgcctcccaagtagctgggattacaggagcctgacaccacgtccagctaatttttgtatttttagtagagacagggtttcaccatgttggccaggctggtctggaactcctaacctcaagtgatctgccagcctcagcatcccaaagtgctgggaatacaggcgtgaaccactgcgccctgtgccccgttctatttctgaatcccagaagtaacacaagggatctcattaacatcaggtataaataatcctccttacataacaaaaactagcaccagtctccatcatatttcaagtctacccttaatagacctaaatatgctactggcaattgcagcactatctgtcccgaagagggctgaggccgacttaaccaaacacaactccgaaatatcttggcctactcatcagttgctcctataggctgaataatcacaattttagcctacaacccttctatcacaatcctaaatctatggatttacataaccctaacaattacagtatttatattatttaatctaagtacaagtactataacattatcactacattatatatgaaataagttaccactactacttccacaattcttatcaattttccctactgggactaaccccccttacaggatttatacccaaaggagttatcattcaagaattaacaacaaaatagccttattatacccacacatagagctgtcacagcgctatttaatcaatgtttctacatacgcctaatttactccacatcactagtgatattcccaacaactaataacataaaaataaaatgacaatttgaaaatataaggccaggtgtggtggctcacacctctaatcccaacactttaggacgctgaagcaggaggactgcttgagcccgggagtttgagaccagtctgggcaacagagaccccatctctacaaaaaattaaaaaattagccaagtgtggtggaatggtcctgtagtcccagctactcaggaagccacaccactgcactccagcctgggaaacagagcgagaccctgtcacaaaaaaaaaaaaaaaaaaaaaaaaaagaagaagaaactataaagcaagccctctttttatcaccactcattactgtatggaccctattcctaccactcttactctcaccaatactttctcttttttgttttttttcttttttgagatgaagtcttgctcagttacccaggctggagtgcaggggtgtgacctcggttcactgtaacctctgcctcccagattcaagtgatcttccctcctcagcctctcgagtagctgggattgcaggcatgtgccaccatgcctggctaatttttgtatttttagtagagatggggtttcaccatgttggcagggctaagctcgaactcccgacctcaagtgatctgcccgcctcagcctcccaaagtgctgagattataggcatgagccactatgcctggccctcaccaatactttcaacaataaactagaaatttaggttaaattaggctgggcacagtggctcacgcctgtaatcccaacactttgggaggccaaggcgggcagatcacttgaggtcaggagttcgtgaccagcctggccaacatgacaaaaccccatctctacaaaaaatacaaaaattagccaggcatggtggcacacacctacagtcccagctactcaggaggctgaggcgggaggatcagatctacatctaccaccataattattgccatccctgcagatagtaaggtctttagttgactaacaacagtacctggaggcaatattaaatgatccgctgccatactctgagcactaggcttcattttccaattcacagtgggaggtttaactggaatcatactatcgctagatatcattccacatgatacatattatgttgtaatacatttccattatgtcctgtcagtaggatctactgctatagatgcccaagaagtagaggcagtatgaactattctacctattatctttattttaattgctcttccatcgttatatattctgtatacaacatgaaattaataacccctccctaaccatagaaactatagatgatactggccaggcgcggtggctcatgcctgtaatcccagcactttgggaggccgaggtgtgcggatcacctgaggtcgggagttcgagaccagcctggccaacgtggtgaaaccccatctctattaaaaatacaaaaaattagccgggcgtagtggcagggcctgtaattctagctacttgggaggctgaggcaggagaatcgcttgaacccaggaggcggaagttgcagtgagccgagattgttccattgcactctagcctgggcgacagagtaagagtctgtcccaacaacaacaacaacaacaaaaaggccgggcgtggtggctcacgcctgtaatcccagcactttgggaggccgaggcgggtggatcatgagatcaggagatcgagaccatcctggctaacacagtgaaaccccgtctctactaaatatacaaaaaattagcgaggcgtggtggtgggtgcctgtagtcccagctactcgggaggctgaggcaggagaatggcgtgaacctgggaggcggagcttgcagtgagccgagatcgtgccactgcattccagccttggcaacagagtgagactctgtcttgaaaaaatatatgtatatatatagatgatactgaagctatgaatatacaaagtatgaagacctaaattttgactcctacagatttcctacaacagacttaaaaccaggagagctgcagctacttgaatttgacaatcaagtagccttccccgtagaaacatcaattcaaatattaagttcgtcgaaagacatcctacgttcatgaaccttaccatcattaggcctaaacagatgcaatgccaggatgtttaaaccaagcaatcctgacatttacacaatcaggcctttctacagtcagtgctcggaaatctgtggatctaatcatagcttcatacccattgttcttgaacttgtttagtacccctaaaacacttcgaaactggtcagcatctatattataatatcactgtagagctaatcagtactaaccttttaagttaaagactgagttatgatctttccacaacgaagtgccccaactagacacatccacacgatttattactatcatatccataatcctatcaccatttcaattaaaaatttcaaaattcatctacccaacaaactcaacactaaaagcttttgaaatatagaaacatgaaaccccttaagaaataaaatgaacatctctttcattaccccaacaatagtagaactgcctgtagttattctttttttctttttttttgaggctgagtcttgctcttgttgcccaggctggagtgcaatgtcgtgatctcaacttactgcaacctctgcccttcgggtgcctcagcctcccgagtaactgggattacaggcacccaccactacactcggctaattttttgtatcttttagtaaagacgggatttcaccatgttggccaggctggactagaactcctgacttcaggtgatccacctgccttggcctcccaaagtgctgggattacaggcatgagtcaccacgcccagacttcctgtagttattctaattatcctgtttccaaatatttccatcacctagccatctgattaacaactggctaatttctgcccagacgcgttggctcacgcctgtaatcccagcactttgggaggccgaggcaggtggatcatgaggtcaggagttcaagaccagcctggccaagatggtgaaaccccatctctactaaaaatacaaaaattacagcgtgcctgtaatcccagctactcgggaggctgaggcaggagaatcgcttgaacctggggggtggaggttgcaatgagccgagatcgcgccactgcactccagcctgggtgacagagcgagactccatctcaaaaaaaaaaaaaaaagaaaaaaaagaaaaaaaaaaaaactggctaatttctatacaatagtgactattaataattcaacttatactaaaataaattatgataatacataatatcaaaggacaaatctgatccccttgtttttttgttgttgtttttgtttttgtttttttgagatggagtcttgctctgtcgctcaggctggagtgcagtggcatgatctcggctcatcgcaacctctgcctccagggttcaagaggttctcctgcttcagcctcctgagtacctgggattacaggtttgcaccaccacacctggctaatttttatatttttagtaaagacagggtttcaccatgttggtcaggctggtctcaaactcctgaccttgtgatccgcccgcctcagcctcccaaagtgctgggattacaggtgtgagccactgcgcccggcccccacccccggtttttgtttttttttttgagacagagtcttgctctgtcacccaggctggagtgcagttgcatcaccatggctcactgcagcctcaacctcaaggcatctgcccacctcagcctcccagagtgctgggattacaggtgtgagccaccatgcccagccgaacctgctcccttatactaatttcactgatcttcttgtttcaacaaatttactagggctcttacctcactcattcacaccaactactcaactgtcaataaacttaggtatggctattccactatgagcaggagcagtaattactggcttgcaccacaaaacaaaagcatccctagcccattttctaccacagaaaacacctattttacttattgccgtactactaattatagaaaccaccagcctcttcattcaaccaatagccttagctgtgtgactaacagccagtattacagctggccctctgcttgttcatttaattggaggcgccacacagtattaacatcaatcaacctacccacagcctcagtcagatttacatcttgattatattaaccatttttgaattcgtcatagctttaatccaagcatatgtttttacactactagtgagcctctatctacaagacaatacttaatgacccagcaaacccatgcgtaccatctagtaaatcctagcccttggccattaacaggggctctcttagcactaataacatccactacccagacttagtggttggatggcaagcatgtggtctttggcaaggtgaaagaaggcatgaatattgtggaggccgtggagtgttttgggtccaagaatggcaagaccagcaaaaagatcaccattgctcactgtggacaactctaataagtttggcttgtgttttatcttaaccacccaccagaccattccttctgtagctcaggaaagaacccctccactccatttgcttgcagtatcctagaatctttgtgctcttgctacagttccctttaggttccatgttttccttattcccttccatgcctagctggattgcagagttaaatttatgattatgaaataaaaactaaataacaaaaaaaggtaaagaaagaatacgataaacatggaaacaaattaaacataaaaaatgcctgaaaaccatttcatggaagataaaagaccacataggaaaaatgttcaacagcaatggtaaccagtaaaaagcaacatataattacacagagactgtgtttaacactcaaggagcacaaataaataagttagataattccaagcattggcaaattgcaaggaataaacacacatgcatgagtggtcaaatggttaattgatatactccatcagtatttcctactaaatatgaatttatccataatatacaactcagtaattttttcccaatatgtaaaaaatttataatttagcacttggagacataaataagaatgacattgtcaccaggatcaaaaaataaacttgaaacaacattagtccacaagcaatagaatgaagcctcagacagtaatgtatgtgcaacagactgaggcaaaaaaaccacaaaaaaaaactttcagcataacattaattgtaatagtaatactaacttgctgaaaactcaaaatagccaaaactctactttatggtaaatagatggtaaatctataaagaataacaacaacaacaaatcaccatcatggtcacctctgggtgcagaagggaggtgagatcagggtgacataccagtgctgccaacagcctatttagctgggtggtgagtccgtgggtgtttatgttataatttctttttttttttttttgagacggagtctcgctctgtcacccaggctggagtgcagtggtgcgatctcggctcactgcaacctctgcctcccaggttcaagcgattctcatgtctcagactcccgagtagctgggattacaggcgcccaccaccacgcccagctaattttctgtatttttagtaaagacggggtttctctatgttggccaggctggtctcaaactcctgacctcgtgatccaccagcctcagcctcccaaagtgctgggattacaggcgtgagccactgcacctggcctatattattatttaaactaagcataagtattttatttccagaattctctttgcttcttcagaccttatgactcaatccaaccagattgtcaaccaagacaataaaactcttacactcaaatcatggaataaaattcttgaatgcttcagcaaactataattatatggcagcaatattctgtaaagaaaatgagtgtgaagctgctctgcccgagtggctcagaactccaagagatatacctgattggggcaaggcccccaaaaagactttagctcaaagatcaatctcttgcttactccctacaaggagtgtgcacattccttacagcttccaccttttttcttttttttttttttttgagacggagtctcgctctgttgcccaggctggagtgcagtggcacgatctcggctcactgcaagctccacctcccaggttcacaccattctcctacctcagcctccctagtagctgcgaccacaggcgcccgccaccacacctggctaattttttgtatttttagtagagacggggtttcaccgtgttagccaggatggtctcgatctcctgacctctgacctcatgatccacccgcctcagcctcccaaagtgctgggattacaggcgtgagccaccacgcccggcctttttttttttttttttttttttagacagagttttgctattgttgcccaggctggattgcaatggtgcaatcttggctcacagcaacctccatccgcctcccaggttcaagcgattctcctgcctcagcctccccagtagctgggactacaggtgcctgccaccatgtcctgctaattttttgtatttttagtagagatggggtttcatcatgttggccaggttagtctcaaactcctgacctcaggtgatccacctgcctcggcctcccaaagtgctgggattacacgcatgagccaccacgcccggccgcaaataaactcttaaattcataaaccttttctttagcagacagaacccaaaggtgtctgactcttacagatgttctcattttgcacaaattacactctgactaaatcaactctgcggatggaaaaccaaactgctgaccatgttgaattttaccttagttctgtaggtaacggaaaccccaccactaccaccatcttctgtgatctagagaagcaggctactacaaaataacacccttcccattacaacttagatgatgtccctgtctacctatgtataaggccagacacacactctccaaattcccattctttgcctcatgaacaattagctgaacagttttatcttcactgatcagttgaaacaaaataccagtgaacccacactttggttaagtttctttctttcttccaggcccctgaacttccacccaccttcagtagcctgagcaagcacccaaccccacctttatgacccctcctaagaacaggctgaccttaggatcaaatattctctaatctagcatctgattttgctcccctccatcctgccctctctctctctcactttattactaatctagcttgctcctccctatgaaagaaaactttacctaacctttgagatgctttcaaatattatacttggtgctttcctcctatcactacaatacttcattcaaataaggtcactacttacctaaatctggattttacttgagggtgtctagaaacagccccagggcaataacaactacaaccacagaaggggcaacagatcccacccccaaccgcatctgcctatggatcccctaggaaacctgcagcatagtctcgccaggaagaactaaatgggccttcggtgacctccccttacaggctcaagattggccttagcttggagtcactggcctaaggcctctgctctccactgaagggtactcattttttttctctattcgacaagcttttattggggtatctactatgtgccaggtaccagtctaagtattggggaacaaagactaataagctcccagccaggtgcagtggctcacgcctgtaatcccagcactttgagaggccgaggcggatggggagttccagaccagcctgaccaacatgaaggaaactccatctctaccagagtcaaaaaattctggtatcaaatcctggatttgccacttattagctctgggactgtgagctaatgattaattctttctttctttttttttttttttgagatggagtttcactcttgttgcccaggctggaatgcaatggcgcgttcttggctcactgcaacctccactgcctgggttcaagcgattctcctgcctcagcctcccaagtagctgggattacaggcatgcgccaccggacacctggctaattttttatttttagtagagatgggggtttctccatgttggtcaggctggtctcaaactcccgacttcaggtgatcctcccgcctcggcctcccaaagtgctgggattacaggcgtgagccaccgcggctggctgaacaaacctcttcaaggtgacgaacccagggagaggtagtgctgacttagaacacagaaatgtctgactcaagtgtcaggtcaggtcatcctgtcacatgggacaccccctcaccctcaatgaagtgctcaatgatcaccatcccaagataagacaatgcattgtacacccccgtgtacccaaaatggcatttcgcttttcagttttcttgcactgccatgactgcgtgggttttttcttgtccttcggtatagtttttctcccttctgtagtctgagagaatccagaaggcaagaatcaatacccctcaataccagcatctgattgggtgacccccagtatccccaaaggaatggaaactggggttggcgaagaaaagctgagtgccccaggggttggctatttatttgagggggataccaggagactctttccagccgagggtatccagctgctcccctgagaggccccaaacctatctctgagaagataaccgaggagctcataattcactagatcctgcaagagacttggcagctgagggcatcttgggtctgccccaggcagttctgaaatctaagaccagggaaggatagagggtgggctaaggacacatcacggcgtaaagtttccaaaaaggaacctcaacccaaagacattctgataaggtgtctgtgcctagggaagatgaaaggagaggcacaaagtatttttacggtagagcgccaggtgcttactctctgctttcctctcagaggaaaagtccacaaagagaaaacaaatctcttaaaaaaagccatccattgctttgtagggaaaaatgaataaacaattctaatactatgtttgttggaaatgtagaatgaaggacaaaaagctgataaagttggctgggtgtggtggctcacgcctgtaatcccagcactttgtgaggccgaggtgggcagatcatgaggtgaagagatggacaccaacccggccaacatgatgaaaccgagtctctactaaaaatacaaaaaattagctgggcgtggtggtgcgcgcctgtaattccagcttcttgggaagctgaggcaggagaatcgcttgaacccaggaggcggaggttgcagtgagctgagattgcaccactgcactccagcctggtgacagagcgagactccgtctcaaaaaaaaaaaaaaaaagccatccacatccattgctttgtaaccaacaagcaattctaatactgtgtttgttggaaatgtagaatgacggacaaaaacctgataaagttgtgaactggaggaaagctggcctttggaaatgcagggaggaatttattcccagcccctgtatgagggccgaggtcgtgtctttgggaccctgcttcccatacatttagaagacctgtagagaaaccagtatccccgggaaagatgagggactgaggatcccacagaccacagctcctcccacactaaccccacaaccgaggcgggattccccccatgaccctcccgtgaccccgcacaatctggagaaacgcggggctgcggtcgccacggacggacgcgataggacgcccggggtcccggctgccggcccagacccaccccgcggcagaggggaccgagggacgagctgcgccaggaggactcaagtcccagatcccgaagtcgccgcggggaggcccgggtccctccacagctggatcctgctggattccaaccagcccctcctccaagtctagggactccaagccccgcacacgcaccgtatcccgggttccaggtgtcctggcttccttactacgcctcctttggtcagagctggtcacagcagacagggactgcagcggcgccacctgtggcgtcctctgcagaaaggacctgccccgctgacctgttgaccgttgcccaggcatcctggcggcacaccccattggactgttcagagctcgccccagcgcccccgattgggtagattcgggctccaccccctgcgtcacagaagtcatctaataggtggctgcagggataggctgtaaccgcagccaatagcaggcccagcttcctccaggcaaccaaatcaggctccgctggaggcatcaacacaattgtccacaggctttccagagctactactactggcctcttcctgtactcggtgggccctttctccctcttccaggtcacagatgagcagaaggaattccagactcagtgtccaatggagacatctccttccctcaaagcaaaaggaagccgagtccaaaccaggccacactggaacagcagggagggcctgatgtcctccagagatcaggaatttgggatggggcagttggtgccatggccaagccattttctcaccttatctcttagtctactcattttcagcccagaaaaaaaaacaacaacaacaaaaaccatgccaacgtgggaataaaattaataaaggcatggaaaaattattaaatgcatagttatatggcagcattattccataaaggaatcaaaaggaaagcaaacatttgaactagctcaggcaagcaggcttcacccacagttcacaaggaacacctgcattcaggtttaacatattcttaatcttgggagtcagactcttgactactgaaatggatgcccaggtcgatcagaccctcctgatgaggtagggaaacctaaggatttaactctgggagctcaacatgcccttatgtaccctccacacagtgtggaaaagctgcctccttcaagaccttcatttacacctgcaggagactcttacctggagtcagtttaacattctaacctacataaactatcagctacataaatcctttctccaaaatgagtctttatctgagcctgaccatgccagatttacttcacatatacaaattacagttggaccacaatgaccctatgtatgccaaaacaaacacattgcccagaaaatagttagcctgagaaaggacagaacaccccaagcatgtcttcacatgaatcttttgctttccagggctctgcttctcagaatctgcactcctgtagctgttctgagcaaccagaggccacctacggagacaacaggctgcccagaaagccacatgaggagctccatttccctccctttgcaggctccagactggcctcaggttggagtcactggctgcaggcgctgctgcccactgcaggttcttcacctgcttctcaccagcactgatcagctacatgagacaaagactctctatcgtactgtatgagaaagaaaccagcaaagtcctacgtttcctcctgtgtttacatacaaatcagaggaagaaaatcttaaaatattttatatggattaaaacactggagtgggcgtaagtaatggcttgtgcctgtaatcccagcactttgggaggctgcagtgggaggatcgcttgagcccaggaattcaagaccagcttgggcagcatagattttcacctctagaaaaaaatttaaaaacttagcagtgcatggtgatgcgcatccatggtcccagctactcaggaggctgaggcaggaggatcacttgagcctaagaggtcagcactgcagcgagccaagattgtgccactgcactccagcctgggcaacagagttagactctgtctctaaaaagatttaaataaatatattttaaaattggcaaataagcattccttttagaaaacaaagatgctagcgaactattattttcacattaacacttatgaaaagaactaatcaaatgtgagctcttcccttttttctctgtttcagtggccacctgaccttcacagtacatggttgtcaccaggtgctctgtggctggggatgttcatgtccagtttatccatctgaatctctctcaaccccaccccaccaccattgacccacccaattatttctgtagctaaacattaagcattgtataaataactgtccctttcaaagaggactcaggttgaatacacctgtgattctctcagatcctctgatataatcatttgcatttgtcttccaggatagactgtgatatcttgagtaggaacctcattcattgtatttgcttctgttcccccaaacctgtgtcaccacctgatcattgaggacacagaaaatttattttatttatttttttgagatggagtctcacttttttttttgagatggagtcacccaggctggagtgcagtggcatgatctcagctcactgcaacctccacctcccacgtcaagcgattctcctggtcagcctccagagtagctgagattacaggcatgcctcaccaaaccttgctaatttttttgcatttttagtagagacagggtttcaccatgttggccaggctggtctcgaactcctgacctcaaatgatccacccgcctcagcctcccaatgtgctgggattacaggcatgaaccaccgcgcccagccaacacagaatattttaagctgaccatcaacctgctgtaaacattggagatctcagcacaaccctaaaacatccacaccccagggagagtatacagatattaacgtgccctcactacaaggagctccactgactccctttctggaaaatgactcaaatcggttttctggaggactatatgcaattaatagatataaaaataacatgttgtttgcttttatttacatgatttaccatttctgtttgtttttgagacagggtcttagtctgtcacccatgctggggtgcggtggcttaatcttggctcactgcaacctccacctcctgggctcaagcaatcctcccaccccaaccccttgagtagctgggactacaggtgtgcaccaacatgtttggctaatatttaaatttttggtagagatgaggtcccactatattgcccaggctggtctcaaactcctgaaatcaagcagttcttctgattcagcctccctaagtgctgggattacaggcgtgagccactgtgcctggctgatttaactttcataggttgttaagaaagcgattaaccctgtgaaccatggttggatttcactgattctcaaaacttgtagtgaattcttataattttatgttgccttgacatccattttaaatacaagtttaactttctcataggagaagcagggtttattcactgttaacactgtttccagttctccacctcctcccagttccttaatgtagtgaatccatatatctgccttagacaactgatacccagtgaccacctcgttataggacagccagatataacgttcatactggcctcactgacccccacgcttcatatgaactgtgtaggtgtgctacagtaaccacctctcagtcacactgtgatctccttgaacttgtgcctgcttgctttaaacccatcaattaaaattccctaggggaaacttttgtgtcttttttggtttgtttgtttttgagtcggcgtctcgctctgtcgcccagactggagtgcagtggcatgctctcggctcactgcaacctccacctcccagcttcaagcaattctcctgcctcagcctcccaagtctctgggactataagcacgtaccaccacgcccggccaattttttctatttttaacagagttggggtttcaccgtgttagccaggatggtcttgatctcctgacctcgtgatccaccggccttcgcctcccaaagtgctgggattacatacgtgaggcacctcgcccggctgtatccctaggggaaactttcggtaacaccctggactctaataaaggtactgacccatgggttcatccatttctccctttctctccatgtggtccctctgtgtgtgtggcctccgtgtatactgtgtatcctccaggacctgtaagtaataaaatccttatttccatcttatgtctctcgtaatcattgaaagggtgctctccattttaaagatcctaaattattacaattggtatagttggcaggatacagagtgattctcatgattagcacaagttatctttgagttgctatagcttattaacatcataaatcatctgggcaaccacactggtgaggtagtagtatttgctgtaataaatgaaatagagatgaaaaaacaacacaaggccaggcgtggtggctcacgcctgtaatcccagcactttgggaggccaaggcaggcggatcatgaggtcaggagatcgagaccatcttgactaacacgttgaaatcccgtctgtactaaaaatacataaaaaaaaaattagccaggcatagtggcaggtgcctgtagtcccagctactccggaggctgaggcaggagagtcacttcaacctgggaggcagaggttacagtgagccgagatcgcgccactgcactcccgcctgggtgacaaagcaagactctgtctcaaaaaaaaaaaaaaaaaagaaagaaagatcaacaaaatgaagagtttttttaaaaaggtaaaatcagcaaagctctagcctgactcactagataaaaatagcagattcaaataaagaaattcagatgtgaaaaaaaaggagttggccgggcatggtggctcacacctataatcccagcactttgggaggccaggcgggtggatcacctgaggtcaggagttcgagaccagcctggccaacatggtgaaccccgtctctactaaaaatacaaaaattagctgggcttggtggcgggcacctgtaatcccagctactcgggagtctgaggcaggagaatcgcttcaactggggaggcagaggtgacagtgagctgagatcgtgccattgcactccagcctgggagacaagagcgagacttcatctcaaaaaaaaaaaaaagaaaagaaaagaaaaagaaaaaaaaggagttggctgggtgtggtggctcacgcctatgatcccagcactttggaaggctgaggaaggaggatcacttgaggtcaggagttcaagacaagcctggccaacatggtaaaaccccgtctctactaaaaatacaaaaaattagctgggcatggtggcgcatgcctgtaatcccagctactcaggaagctgagacaggagaatcacttgaacacgggacggggaggttgcagtgagcggagatcgcaccactgcactccagcctggacgacagaacaagactgtctcaaaacaacaacaaaacaacaaaaaaaacagggtcattccaacttatactaaagaaatagaaagaattataaaacagactattatgaacaactacacaccaatgaattggaaaacctagaagaaatagataaattcctgggcacgtacaacctatcaaaattgcgtcgtgaagaaatagaaaatctgaacagactaataagaagtaatgaggttaaatcagtaataaaaagtgtcccatcaaagaaaagcccaggacctgatggcttcactgctgaattctaccaaacaaacacaactaaaaagtacaggccaacatccctgattaacatagatgtaaaaatcctcaacaaaatacatgcaaactgaattcaacagcacattgaacagaccattcaccctgaccaagtaggatgtatcccatgggtgtagggatagttcaacatatggaaaccaataaacgtgatacatcacagtaacagaatcaacaagaaaaaaatatcatttcaatatatgcagaaaatgacttgataacattccatatattcatgataaaaactcacaacagggccgggcgcagtggcttatgcctgtaaacccagcactgtgggaagccgaggcgggatcatgaggtcaagagatcgagaccatcctggccagcatggtgaaaccccatctctactaaaaatacaaaaaattagctgggcgtggtggcacatgcctgtagtcccagcaactcgggaggctgaggcaggaggatcacttgaacccaggaagcagaggatgcagtgaattgagatcgtgccactgcactccagcctggcgacagagtgagactccgtctcaaacaaaacaaagcaaaacaaaacaaaaaaaactcacaacaaattaggtatagaaggaacatatctcaacacaatgaaagctttatatgacaaacctacggcaaacatcatactgaacaggaaaaaaatggaatgctttttctctaagatctggaataagataagcactcccaccacttctagtcaatgttgtattggaagccctcatcagaattattagacaaaaaagaacaacaaaggaagggagggaaggaaggagaaaagccaaccaaattggaaaagaagaagtaaaattacatttttgcggacaagattgtatatatagaaaaccttgccgggcacggtggctcacgcctgtaatcccagcagtttgggaggctgaggcgggtgaatcacaaggtcaggggttcaagaccagcctgaccaacatggtgaaacccccgtctctactaaaaatacaaaaattagctgggcgtggtggcagacgcctgtaatcccagctactcaggaggctgaggcgggagaattgcttgaacctgacaggcggaggctgcagtgagccaagatcgtgccactgcactccagcctggcaacagagcgagactctgtctcaaaaaaaaaaaagaaaaagaaaaaagaaaaccctaaagacaccaccaaaaaattgttagaactaaaacaaatgcagcaaagttgaaggatatgaaaatcaacatataaaaatcagtagtggccccagcctggccaatatggtgaaaccccatctctactaaaaatatataaaaaaaaaaaaaattagccaggcatggtggcagatgcctgtagtcccagctactcgggaggctgaggcaggagaatcgcttgaacttgggaggcagaggttgcagtgagccgagatcgtgccactgcactctagcctgggcaagagagcgagactctgtctcaaaaaaaaaaaaaaaaaaaaaaattcagtagtgtttctatatgccaacagcaaactattagaaaaaggcatcaagaaaccaattccatagatgatagctacaaaaataaaatatttaggaataaatataaccaaagaggtgaaagagctctacaataaaaactataaaatgccggtgaaataaattgaagaggacacaaataaataggaggatattctgtgttcatggactgaaagaattaatatttttcttttcttttttttttttttgttttgagacagagtctcactctgtcaccccaggttggagtgcagtgctgtgatcacagcttactgcagccttgatgttccgggctcaagtaaccttcctgcctcagctgggactacaggcacacaccaccacgcccagctaattttttaaaaatttgttgtagagacgaggtctcactgtttcctgggctagtctcaaactactgggctcaagtgatccttctgcctctgcctgccaaagtgctgggaatacagatgtgagccaccatgcccagcttagaatattcttcaaatgtccataccacccaaagcaatttgcagattcaagtgtgatccctatcaaaatacaagagccatacttcacagaaatcgaaaaaattatcctaaaattcatatggaaccacaaaaatagccaaagcaatcttgagtatgacttcacaatagactacaaatctaaagtaaccaaaaaagcaccgtactggcataaacatagacagaccagtggaacagaatagagaaaccagaaataaattcacacacttaccaacgatttttgacaaaggtgccaaaaacacagactggagaaaggacagtctcttcaatgaatggtgatgggaaaactggattatcaacatgcagaacattgaaactggacccctatctttcaccatatacaaaaatccactcaaaatggattacggacttacatgtaagacttgaaactgtaaaactactaaaggaaaacagtaaaattctacatgaccttgtctgtgcaaggactttgtggataagaactcaaacacacgggcagcaaaagcaaaaacagacatgagattacatcaaacatctcaatcccagcattatctcactcattccacctctgggagttactctggggcagtctctggctggattcatctttctctgtgctctgcacagacctagtaccaaggggactagaagcagcatttacttgttcactaaaaaaggggtatctgcaggaaggtgctgcagttcaggctgtggccacgctggggcatcagtagacaggtaaaatgtagtaagataacccacagaaggtgcatcgtgacgtgcttgacagtaattctgtctgaagcgttttgttttgctttgttttgtttgagacagggtctcactctgtcacacagattgaagtgcggtggcatgatctcagctcactgcaatctccgcttcccaggttcaggcgattctcctgtctcagcctcccgagtagctggaattacaggcgtgtaccaccacacccggctgatttttatatttttaataagagacggggtttcaccacgtaggccaggctggtcttgaactcctgacctcaagctatctgcacacctcggcctcccaaagtactgggattacaggcgtgagccactgtgcctgggcataaagtgtttccattagcagtactcatgttgcggtattattgtcatcatcatcattttcataaagtagaaagtaaaacttctctcaatggtacccataatttacactgaagatgtaactattccttgagaacaagatagaacctggcctgggaaacagcactaatgcttgtaaattagttctgtgacaactattctgatttcttctatggttgcttattcttccataccatgtaagtaaattccgtgattattagttttgggtgattcatgctttccccactagaaagaacaatttggtttattacgctatcttccacccgtttctccaacaccagtcactatttcagtcagagcatgaagaaaaataattttggaaatggaaacctgatgttctgccatttaaaggtacttcatgaaatccactccaagagggatcacttgcttcatttccttgcagagttgttttttgtttttttttttttttttgcgatggggtcccactctgtcgcccaggctagagtgcagtggtgcaatcttggctcactgcaacctccgcctgctgggttcaagcaattctcctgcctcagcctcctgagtagctgggattacaggcgtcagccaccatgcatggctaatttttcgtatttttagtagagttggggtttcaccatgatggccaggctggtctcaaactcctgacctcgtgatccatccgccttaccctcccaaagtgctggattacagacatgagccactgtgcctggcccatttatttctttattgtgcaagcagtgacttatttatccactgcttttttttttttttttttttgagatggagtctggctctgtcacctaggctggagtgcagtggcgtgatctcagctcactgtaacctctgcctcccaggttcaagcaattatcttgcctcagcctcccaagtagctgggattacaggtgtgcaccaccacacccagctaatttttctgtttttagtggaaatagggtttcgctgtgttggcgaggctggtctcgaactcctggccttaagtgatctgcctgcctcggactcccaaagtgctgggattacagacataagccaccacaccaggcctggctctccatttcttgaacaccacctttaccccaggtacagaattagtggtaaatagttacacattacctattacataaactttccatacctaagaagttctctcccaccttttctggacactatatgctgctatttcttctcatattcttaaagatttccgagcaaagaatttctatttgcttaaattatcagatatatatttgatatacatgtctgtgaatagtgtgcagaggaaattaaaagtatccctcttcaataaagggaagtggttatcataggccctgggtctgggagtgaggtccaggtctacagtgaaggggggaggagacagggaagtcaatcctggggatcaaatctaaatgcctactaaaatccaaatggactgtgtaggaacaggtccctcatggatagaaaaacgaaaaaaacagtgctgagaacaagtaggaaagagacctagagactaggcgcagtggctcacgcctgtaaccccagcactatcggaggccgaggcggacagatcacttgagatcaggagttcaagaccagcctggccaacatggcgaaatcccgtttctactaaaaatacaaaaattagctgggtgtggtggtgcgcacctgtaatcccagctactcaagaggctgaagcatgagaagcctttgaatctgggaggcagagggtgcagtgagccaagatctcaccactgcactccagcttgggcgacagagcaagaccctatctcaaaaaaaaaaaagagagacctagagtgtcttggtatgctgaaggtcccacaaggtctatgcagtactgtggtcttttctcccttttttgtgtgtaaaacatacataaaattcaccatcataatcaattttaagtgtacagttcagtgccattaagaacattcatactagtgtgcaaccatcaccaccatccacctctggaaccctttttatcttgcaaaattgaaactctatgcccatgaaataactatccattacccaatttccctaacctttggcaaatggtattgtactttttctatcaatatgactactctagatacctgatataagtagaatcataccgtattgtctttacatgaatggcccatttcacttagcacgtcaaggttcatcttgcagcatatttgtaaatttccttactttgtaagactcagtaatattctcttgtatgtataaacttccttttgtttattcatctgttgatgaaaacctgagtagtttccagagtttacctattgtgaatgatgctatgtacacaggtgtacaaaacctatttgagactttgctttcaatcttttttgttttgttttgttttttgagacggagtcttgctctctcacccaggctggagtgcagtggcgcgacctcagctcactgcaagctctgcctcccgggttcatgccattctcctgcctcagcctcccgagcagttgggactacaggcgcctgccaccacgcccggctaatttttttttagtagagacggggtttcatcatgttagccaggatggtctcaatctcctgaccttgtgatccgcctgcttcggcctcccaaagtgctgggattacaagcgtgatccaccacgcccggccctgctttcaatctttttattttcccagaaatggaaatgctgatcatatgttatttctatattttaatctggggatctgccatactgttttcagcaggcttataccactgtacattcccagtgatagtgcacaatgttctccaacattccacatccttgacagtatttcttgttttccatctttgatactactaatcctaatgagatgctatgtatgtcttgagtttgatttgtatttccctaatgactaaagatgtcgagcattgttacgtgcttattggccatctgggtatcttctttggagaaatgtctattcaagtcctttcctccattttaaaattggattgtgtcttagcttgggttgctaaaacaaaataccataaattggaaagcttaattaatcaacaaacatttatttctcatggtttgggaggctgggaagtccaatatcaaggcactggcatagtccatgtctggtaagggcctgcttcccggttcaaagatagctatcttctcactgcaccctctcatggtgaagggcaaagctagctctctagggattcctatcaggaaactaatcccaattacaaggcctccatcttcatgatgtcctccaatcctaaaaaccaccagagacagggcctccaaataccatcacattgtgggggagagggggggcacgggggtaaggtttcaacatatgaatctgaggtggcatacactcagccaaaacattacacctctggcccccaaaatccatgtcatcacatgtaaaatatattcatctcatcccaaaggcctcaaaagtctcagttaattccagcatgaagcctaatgtttaaactcaaactccaaagtgtcatctcaatatcacatcactcagatatggatgagactcaattcatgctgaggcaaaattcttcttcagctccgaaccggtgaaaaccaaactagtcatgtatttccaaaatatgagacaggcacaggatagagattcctattccaaaagtgagaaacaggagaaaggggtgagctcccaaacaagtctgaaacccagaaagcaaactgaagactttccatattctttagatatgtagatacttgtagacctgtcctccactattcattttcacaggtattcgaaggttgtgtgataaatgaaagctttcccacattctttacgtaaggtttatctccattatgagctctttcatgtctttgaaaggaactggaataactgaacgtttttccacattgcttacattcatagggtttttctccggtatgagttctttcatgtattctaatggaactggcataattgaatgctttcccacattctttacattcatagggtttttctccagtatgagttctttcatgtgttcggacagaactaggacagtcaaaggctttaccacatacctgacatttataaggtccatctccagtgtgcagtatcatatgttttctaatccttttaagagaaatgaaggctttcccacatacctgacattcatagggtttctctccagtgtgagttctttcgtgtatttgaaatgaactgggacagtcaaaggctctaccacatacctgacatttataaggtccatctccagtgtgctttatcatgtgtcttcggacacttgggagagaaatgaaggctttcccgcattccttacattcatagggcttctctccagtgtgagtcctttcatgtgttcgaacattactggaagaactgaaggttttaccacatttattacattcatagggtttctccccagtatgagttctttcatgctttcgaacataactgggaaaaataaaggctctcccacatactttacatttataaggtccatccccagtgtgcctaatcatatgactttgaaaatttgtgaaagaaatgaaggccttcccacactgtttacattcatggggtttctctccagtatgagttctttcatgtattcgaaataaactggggcggtcaaaggcttttccacattcctgacatttataaggtccatctccagtgtgcctaatcatgtgtctttgaaaacttggaagagaaatgaaagcttttgcacattcctgacattcatagggtttctctccagtgtgagttctttcatgtatctgaaataaacttgggcgatcaaaggctttcccacattcctgacatttatatggtccatctccagtgtgcttaatcatgtgtcttcgaacacttgggagagaaatgaaggctttcccacattccggacatgcatagggtttctcaccagtgtgagttctttcatgtcttcgaaaggattgacaagaactgaaggctttcccacactgcttacatttatatggtttctctccatattcctgatagtcatatggtttgtgtccaaggtgagatctgatgtgcctactaagggatgaatgatgcatgaagactttcccacacaaactacattcacatggtcttactatagtaggaattttcttgttcagattaagattgagaatctgactgaaggcttctccacattgatcatattctttactttcactgagtccctcttccatatgatttctggaaaaaatagaaagcaagatttagtggtttgtgactttatatttattaataggtattcgacttacatttttaccataatcgcggaaagggtaagttttcaggcctgtatgaattgtttgaaagtgaatggatggaatgctctgcaagagagcttgacagtagctatcaccaaaaaagtgatatccatatatacagtttcttaatactatttccaagtgaatgattttgcaacactgaacatctatgccactttttctttttctggtgaaaaagttgtaggaataaataaatctgaagctgggcttactggtttgtttacttatttttaaaatttcatgacatactaagaaggagacattgctttatcttgtcagtgcaaattaccttaaaattctcccctgatttttgtaccaatcttcaatgctctggtcttcccatttttttcctaaaatatagtcagaaaaaatccttatgaactgatagacattacagaaaaatgactagattctaagttcatgataaggtgcaaacaaccctgatttattcacccaagtattcccttttccacattagacatcatgaaaaagcattaaaaagcaagaaatacttcttctctaactgactaaaagaaggaatgatgtcatccttacctacacaggccaggtttctaaaggtttcccgcatcacatctctgtagagtttcttctgggaaggatccagcaaagcccactcctcaagtgtgaagttcacagccacatcctcagaggccactgagtcctaaaacatcccaaatatgcaatgcaggaggaagaatgagatgacagtacagggatgtaaacccaattcataaaagttcacaaatggctaggtgtggtggctcatgcctgtaatcccagcactttgggaggccaaggcatacagatcacctgaggtcaggaacttgaggccagcccggtcaacatggtgaaaccccatctctactacagatatatgaattagctgggcgtggtggcgtatgcctgttaatcccggctactcaggaggctgaggcaggggaatcgcttaaacaagggaggcagaggttacggtgaaccaagatcacgccactgcacttcagcctggctgacagagagagaccccatctcaaacaaacaaacaaaaaacaaaacaaaaaagtcgacaaaacgatgtggcagtctccaaacatttattttatgataaataaatatggttgtcagaattccgtctacattcactttctcataaatttaattaccccatgaaaacatgcaactgatctctacatttttactgtagtcactacaagttttattggtctctaatggcaggatccagttcaccttggagaaacaaataaaatgctatacaaagaaaacaaattttggccaggcctggtggctcacacctgtaatcccagcactttgggaggctgaggcaagaggatcacaaggtcaggagtttgagaccagcctgaccaacacagtgaaaccccgtctctaccaaaaatacaaaaaaattagccgggcatggtggcatgcacctgtaatcccagctactcggggggctgaagcaggagaatagcttgaacccaggaagcggaggttgcagtgagctgagatcatgccattgcactccagcctggaggacagagagagactaagtctcaaaaaaaaaaaatttaagatcatcattcctaccaggaaaaacttccatttcctttcatatctcacaccaatcagcattccatgaaacacagggtaggccaggcgcactggctcatgcctgtaatcccaacactttgggaggcagaggcaggcggatcacctgagatcaggagtttgagaccagccagcccaacatggcaaaaccctgtctctactaaaaatacaaaaaattcactgggcgtggtggtgggcacctgtaataccagctacttgggaggctgaggaaggagaatcgcttgagaccaggaggcggacgttgcagtgagtagagattgtgccactgcactccagcctgggtgacaagagcaaaactctgtctcaaaaaaaaaaaaaaaaagaaagaaagaaagaaaaaaagaaacacaggataaaaactgaaaaaggtatccatgaataaataaatatacactgaagaagtgaaaccattttcttctgttcccttcatcaaacatgagaggccagaaggcccgtagaaatccacgttctgacaaaatccagctgaccacactttcctgaaggattccaggccatcagacgtagacagatcaagttggttgaaagaaaatattcctctgcaaaagaagtcattttaacctgcatgtataacatttgttatagactcactgattcctttgactctgtcccatttcactaggctaggaagctactgggaagacagaactcaggcatgaagaagaaggtatggcaacttaggcagcgccccctcacccagcaaaatccccagtcatgaacgtcaagggcagtttcccacctatttttaccttacatacacaaacatactaagaagacaaaatgccagaagagttttttctggcagatacataacaaggtaccctatgacttgctaaccttgaggaacaggttaagagttgcaatttctgagggatttcattcaagtccagatggtttgatggtgaatttgaccatgattataaaatacacgaagggatcagcagtgcttttctccaaaagaacataaaatcctctttctcaaatttcaagaggaaatgattcctgaccagtcactatgtgatactacattgtgtaatgtcaaggcaaaataaaataaggggaaagatgggttcttttggttttcttagaaatgggaacttgctccgtcatccacactggagtgcagtggcatgatcacagctcactgaagccttgatctcctgggctcatgtgatcctccctcctgagtctctcaagtagctagaactatagtcgcaagacaccatgtctagctaatttttaaattttttgtagagatggggtcttactttgttgctcaagctgatctcaaattcctgcctcagcctcccaaagtgctgggattacaggtgtaaaccaccacacctggctggaaagatgggttctgagaaagaatgaaatgtcctcaagatagcctcttacaaaatattttttaaattctataaatcccctaaaaactgttgaagagtcaacaaaaagttcttctccaaatgtagcaggaataatgaatatctaacaatggtcaaagtcttctgaagaacaacatgatagcttccctaacctttaacaagaattctgaatgctggccaggtatggtggctcatgtctgtaatcccagcactttgggagcctgaggcaggcagatcacttgagttcacttgagtcaggatcatttgagttaggagtttgagtctgacctgggaaacacggcgaaacctcgtctctactaaaaatacaaaaattagccaagcatgttgacgcgcacctgttaccccagctacctgggaggccgaggcaggagaatcacttgaacctgggaggtggaaagtgcagtgagccgagattgtgccactgcactccagcctgggtggcaagactctgtctccaaaaaaaataaaaaaaaaaataggagaaccatggtaggcactgaggaaaaaagaccacatatctttcttacaataccacagaaggccacaacccaggccaggaacaaaggctcactaacaaatcatatgattacaaaatatgtcacacctcaggtaaaatgctcaattaaagcccaagaaggaaggtcagagacaaaaaaagaaacaaaagcaagggcaactaatagaaaaaagtaaaaaatatggtagatattaatacaactgtatcaataatcactttgaatgtcaatagtccaaatataattagaagacagatgctgttatagtggattttaaaaacatagtatgttggctaaaaggaaaccactttaaatacaaagacacacatattaaaagtaaagggatagggaaatatataaaatgctaacattaattaaaagaaacatggcatggctatcttaatatcacaaagtacacttcagagaaaggaaaaaacacagagataagccaggtgcagtggcacatgcctatggtcccagctacttaggaggctgagatggaggatcacctgagaccaggagttcaaggatataatgcgctataatttattgtgaatagaccctgcactccagcctggggaacagcgagaccttcatctctataaaaaaaatttaaaaaaaaaaatttttttggccgggcgcggtggctcacacctgtaatcccagcactttgggaggccaaggcgggcggatcacgaggtcaggagattgagaccatcctggctaacacggtgaaaccccgtctctactaaaaatacaaaaaattagccgggcgtggtagcaggcgcctgtagtcccagctactcgggaggctgaggcaggagaatggcgtgaacccggaaggcggagcttgcagtgagccgagatcgcgccactgcactccagcctgggcgacagagcgagactccgtctcaaaaaaaaaaaaaaaaaaaaaaaaaaaattttttttttaattaaccagttggggtatcacaaacttgcagtcagctacttgagaagctgaggcaggtagattgctgcagcctgggagttcaaggctgcaaagagctatatgatcacaccactgcattccagcctgggagacacagtgagactctgtctctaaaaaaaataaattaaatttttaaaataaataaagagatataagtgagcatcacataatgataaaggactcaacatgccaagaaaacctgacaacccttagtgtgtgtttgcataacaagcgttgcaaaatacatgtggcaaaatacaactgatagaactgcaaagaaaaaatacactaatctacttgtatagttggagactgcagcacccctccagcagtaattaagagatccaacaggcagaaaatctgaaaggacatagtaaagtaaatagcatcatcaaacaactggatttaattgaaatgcatggaatacttcatctaacaatagcaaaacacaaattcttctcaagttcacaggaatattcacaaaaataaaccaaatactggggcataaaacacaccttaatatgaaaaattttaaaaaatcatacaaagtatgctcagaccacaagtcattcatctagaaatcaataacagagatagttaccaactcccccaaatctttagagattaaacaacacaattctaaataagcacatggatcaaagaagtctgagaaatcaaaaataatttttgacctaaaatgaaaatgaaaacaaaatttatcaaaaattagggtatgcagcaaaagcagtgcatagaggaatatttacagcattgaacacctacaccaggaaagaacaagggtttataatgaatcatctaagagtctacttcgggctgggtgcagtggctcacgcctataatcccagcaatttgggaggccaaggcgggcagattacttgaggccaggaattggagaccagcctggacaacatggtaaaacctcgtctctactaaaaatacaaaaattagctgggtgtggtggcgcatgcctgtaatcccagctactcagtaggctgagatacaagaatcacttgaacctgggagatggaggttacagtgagccaagatcatgccactgcactccagcctgggcgacacagcaggctgctgtctccaaaaaaaaaaaaaaaaaaaaaaacagaaaaaagaaaagagtctacttcaggaaaacagaaaaacaagagagcaaattaaacccaagtaagcagacagacagacagaataattggagaagtcaatgaaatggcaggaaatcaatagagattaaaaaaaaaaaacagaagtcggttattggagaacaccaataaaactgataaacctctagtcatggtaagaaaaaagaaattactaagatcagaaatgaaaggaggcaaaagtaaaaactaaagaacatttgacaaaatctaccatccactcacggtggcaaactgggaatagagaacttcctcctcagaaagaacatcaatgaggaacctgcagctaacatcatacttaacagtgagaaactagatgctttctacacaagaccagaaacagggtaagaatgtcttctctcaccactactattcaacaacatccttaaagtcctagataagcaacaagacagaggaaataaaaagtatatcgatttagaaggaagaaataaaattgtctttgctgcataagacatgattatataaaatatatagatggcatataaacatatgaaaacatgcatattttgtcactggggaattacaaatttaaaaattaaagactaacacaacctttattagaatggctaaaatttaaaacactgagaacaccaaatgatggcaaagatgtgaagcaataggaaccctcatttgttacttgtgggaatggaaaacagtgcacctattttggaagatggtcagtttcttataaaactaaacatactcggccaggcacagtggctcatgcctgtaatcccacaactttgggaggccaaggagggtggatcacctgaggtcaggagttcaagacccgcctggccaacatggtgaaaccttgtctctactaaaaatacaaaaattagctgggcatggtggcacatgcatgtaatcccagctactcgagaggctgaagcaggagaattgtctgagcccaggaggtggaggctgcagtaagccgagatcttgacactgcactccagcctggacgacagagcaaaactctgtctcaaaacaaaactaaacaaaacatactcaacatataacctaacaatcatgctccttggtatttatcaaaataagctgaaaacatgttcacacaaaaacctgtacatggatgtttatgggagttttattcataatttctagaatttagagttaaccaagagattcttgataaacaaatgaacaatctgcagtacatccatatgattaaatataatcatatggatgaaaagaagatatcaagccatgataagacatagaggaaatttaaaagtacgtcactgggccaggtgtggtggctcacacctgtaatcccagcactttgggaggcagaggcgggaggatcacctgaggtcaggagtttgagaccagcctgaccaaacggtgaaacctcatctctactaaaaataaaaaaatcagccgggcatggtggcggacacctgtaatcccagctactcaggaggctgaggcaggagaatcgcttgaaccaagggggcggaggttgcagtgagccaagatcacatcactgcactccagcctgggtgacagagtgagactccgtctcaaaaagaaaaaaagaaaagtatgttactaagtgatagaatccaatctaaaaaggccatatacaatgtattaccaactataagatattctgcaaaagacaaaactatgggacatgaaaaagtctttggttttaagggatttcaggatgcaaagggcagatgaatgaatgtgtaaactataggtgatttttagggcagtgaaactaccctaacagaaataacacatgtcattaaacattgtcaaagtccagtgaatatacaatagtcaactctaatgtaaaatgtaaacattaatgcatccatattggttcaactgtagtaaatgtaccacagtaatacaatatataaaaaatagggcaaactggccgggtgcggtggctcacgcctgtaatcccagcactttgggaggctcagacaggcagatcacgaggtcaagagatcgagaccatcctggccaacatggtgaaatccatctctactaaaaatacaaaaattagctgggcggagtggtgcgtgcctgtagtcccagctacttgggaggctgaggcaggagaattgcttgaacccgggaggtgcaggttgcactgagctgagactgtgcgactgcattccagagtggcgacagagcgtgactccgtctcaaaaaaaaaaaaaaaaatagggcaaaccgtaaagaagagtgatcattaaataactctgtacttaatgatcaatttttctgtaaacttaaaactgttctgaaaaaaatctgttacaaaaagttaaaatgaagagactcatgactgaaaagtaactaatcactgaaccatgttttttctttttttgagacagggtctcattttgtcacccagattggagtgcagtggtatgatcacagctcactgcagcctcaacctccaaggctaaagtgatccttccacctcagcctcccaaggatctgggactacaggtacatgtcaccatgctcaggaaatttttgtattttttgtagagacggggttttgtcatgttgcccaggctggtctcaaactcttgggctcaagcaatctgcctaccttggcctcccaaagtgctgacatggcaggcgtaagccaccacgcctggcccatatcatatttcatgcaactgatttgaacttattttagtaagccattatggtcatgaatgaggtcttcagccaatgccttgtttaggagccctgcactgtatattccgagaagttaggagcccagcactgtatattctgagaagttaaattagggccttggttaccatcagtactgtctagaattcggacatggatgagtatccatggtattgtggacttcgtataagatatgtattggccaggcaaggtggctcacatctgtaatcccaacactttgggaagccgatagagtgagccatcacatccagccctgaagtcttattctcattggtaaatacaagaaaaacagtaacagattatatagatttggaatgaacctgaaaactcctaatacttttaacagatggtttttagtatatatgtgcaatcataatcacaattttcatcacctcaaaaataagcccatgtactttttacctgtcaatctcctatcctcccatcttcttctgccagtccccagcccttgataagcagcaatctttcggtctctatagattttcctattatggacttccatataatcagaatcatgccatgtggtatgtgactggcttcattataggtttctcaagtcacatccatgttgtagcacgcatccccactttgtatttatggtagaattatattccactggatggatattacacattttctttatctatcatccaatgatgtattacagtcagccctccatacttggagtttctgtatcctcagattcgaccaccctctgatcatgtactatgtgattaggtctatgatggttaggtatatactgaacatgtacagactttttcttctttttattattccctaaacaacacaatataacaactattttacctaaaatttatgttgtatcaggtattataagtgagctaaagatgatttaaagtatatggaagacaatgttttctaagccgggcgtggtggctcacgcctgtaattccagcactttgggaggtcgaggggggcggatcacctgaggtcgggagttcgagaccagcctgaccaaaaaggagaaaccctgtctctactaaaaatacaaaattagccaggtgtggtggcgcatgcctgtaatcccagttactggggaggctgaggcaggagaatcacttgaacccgggaggcggaggttgcggtgagccgagatttcgccattgcactcccgcctgggcaacaagagtgaaactccgtctcaaaaaaaaaaaaaaagaaaaaaaagaaaagaaaatgttttcttaatttccattttgggttgttcagtgacaatgtataaaaataacagatttttgcaggttccatttgtatgctaccaatttgcttaattcatttattacttctaagtgcgtgtgtggggtgggggaagttcttggaagttctacatgtaaaatcacataatttgtgaacaggaaaaaatttccttcttcctgtccaattctgatatcttttctttttcttgtctaattactctgactagaacatccggtactatggcgaatagtagtggtaaaagttaactaagtctcaatagatttttttaaatagaataaaaaataatagtaagttaaaatataaaatgattgtataacacacattcaacatacgaatatacatttacactgttaatatataaatacaaaataaagtaaaatataaaataatattagctcggtgcagtggctcacacctgtaatcctaacactttaggaggcaaagacaggaggactgcttaatgccaaggagtttaagaccagcctggacaacatagtgaaatcctgtctctattaaaaaaaaaaaaatttggccaggcgcagtggctcacgcctgtaatcccagcactttgggaggccaaggtgggtggatcacgaggtcaggagttaaacactagcctggacaagatgatggaaccccatctctactaaaaatacaaaaaaattagccaggcatggtggtgggcacctgtaatcccagctacttgggaggctgaggcagagaattgcttgaacccaggaggcggaggttgcagtgagccaagattgcgccattgcattccagcctgggcaacacagcaagactctgtctaaaaaaaataaataaataaaaaataaaaaaattttaactagtcgagtgtggtggcacaagcctgtaatcccagctacttgggaggctgacacagaaggatacttgagtacaagaggtcaatgctacagtgagctatgattgcgccactacactccagtctgggcgacagagcaagaccctgtctcaaaaaaaaaagtatcaactttagttaataataatgttattggtttgccaattttcatcattatcagatgtaatatgttggtttataatcataactaatacactacactaacgcagtatgttaaaaataggggaggtaggccaggcgtggtggctcacgtctgtaatcctagcactttgggaggtcgaggcaggtggatcacctgaggtcaggagttcaagaccagcctggctaatgtggcgcaatccagtctctactaaaaaaattcaaaaaaaaattagctggacatggtggtgggcgcctgtaatcccagctactccggaggctgaggcagaagaatcgcttgaatctaggaggcagacattgcagtaagctgagatcgtgcctcctgtcaccacactccagcctcggtgacagaacgagactccatctcaaaaaaaaaaaaaaaaaaataggggaggtagggaaaaggggctctgtaatagctcccaaatttttctgtaaactatgaattaaaaaagcaaataaactaacctttcatggaaaattctagtgtaaaaaaagaaagctggctgggcacagtggctcacgcctgtaattccagcactttgggaggccgaggcgggtggatcacaaggtcaggagttcgagaccatcctggctaacatggtgaaaccccatctctaataaaaatacaaaaaaaaaaaaaaaagagtagggcaaggtggcacgtacctgtagtcccagttacttgggaggctgaggcaggagaatcgcttgaacccaggaggcagaggtagcagtgagccgagatcgtgccactgcactccagcctgggcgacagagcgacaattcctctcaaaaagacaaaaaagaaaaagaaaaaggccaggcgcagtggctcacgcctgtaatccaagcactttgggaggctgaggtgggcggatcacaaggtcaggagataaagaccatcctggctaactcggtgaaaccccatctctactaaaactacaaaaaagaaaaattagccaggtgtggtggtgggcgcctgtagtcccagctactcgggaggctgaggcaggagattggcgtgaatctgggaggcggagcttgcagtgagccgagatcgcgccactgcactccagcctgggtaacagaacgagactccgtctcaaaaaaaaaaaaaagaaaaaagaaacctgacattccatagtacacacagtataatgccacttgcgtaagattcattcaaaaatgaaatatgtaactgactggcttaaaataaaatatattgacatagggttgagtacacaggttaagaaaagcaaggaaattatcttataatctataacactggccccatctggaaagagaatggatgatttggcttctaggaatcatttcaagtggggcatgtggtgagaagtcttcaaagtcgtggcctggctgtcatgagactgacattccctttacaatgtttcagttgactgtgcaactgttttatgtagtttcctcatatgcaatatgtttagtaagtttccacaatgaaaactcaatacacaaataagtctcagtgtactccgaattttgagcatcaagccattgaagtcaacatttaaaagagagcatagggccagtgtggtggctcacatctgtgatcccaacactttgggaggctgaggcggacagatcagttgaggtcaggagttcgagaccagtctggccaacatggtgaaactccatctctattaaaaatacaaaaaccggctgggtgtggtagctcatgcctgtaatcccagcactttgggaggccaaggcgggcagatcacaaagtcaggagatcgccaccatcctggctaacatgatgaaaccccgtctctactaaaaacacaaaaaattagccgggcgtggtggcgggcgcctgtagtcccagctactcgggaggctgaggcagaagaatggtgtgaactcgggaggcagagcttgcagtgagccgagatggcaccactgcactccagcctgggtgacacagcaagactccgtctcaaaaaaaaatcagccaggtctggtggcaggcacctgtagtcccagctactcgagaggctgaggtaggagaattgcttgaacccaagagtggaggttgcggtgagctgagatcataccactgcactccagcctgggcaacagagactctgtctcaaaaaaaaaaaaagacagcatagccccagcctcaggaatgtggcaaaaccctgtctctacaaaaaaaaaaaaaaaaaaaaaagaaacacaaaaattagctgggtgtggtggcacgcacctgcagttccagctactcaagaggctcgagggaggaggatcacctgagcccaggaagtctaggctgcagtgagccattgactgcactactgcactccaccctgggtgatggggttaagaccctgcctcaaaaaacaaaaatagctaggcagggtggctcacgcctgtaatcccatcactttgggaggctgagatgggcggatcacctgaggtcaggagttcgagaccagcctggccaacaaggcaaatgcccatctccactaaaaatacaaaaaaattagctcggcgtggtagaacgcacctgtaatcccaactacttgggaggctgaggcaggagaattgcttgaacccaagaggcggaagttacagtgagccaaaatcgcgccactagactccagcctggggatggagactctgtctcaaaaaaaaaagaaaaaaaaaatcaaattaggaagcactacatggagaaatggcatagatccttagaaaagaggctgaatattaccatgatatatgcttaagctgtcccaaatacagtgctttatttaattccataaaattcacaaccagatttgcttggtatgttattaaacttaagaaatgctatttctgccaggcatggtggctcacgcctgtaatcccagcactttgggaggccgaggcaggcggatcacatggtcaggagatcaagaccgtcctggctaatacggtgaaaccccgtctctactaaaaatacaaaaaattagctgggcgtagtggcaggcacctgtaatcccagatactcaggaggctgaggccgaggaatcgcttgaacccgggagagaagaggttgcagtgagccaagattgtgccactgcactccagcctgggtgacagagcgagactctgtccaaaaaaaaaaaaaaaaaaaagaaatgctatttcttggcagggcatggtggctcacgcctgtaatcccagcactttgggaggctaaggtgttcaagaccagcctggccaacacagtgaaaccccgactctactaaaaatacaaaaattagccgggtatggtggtgggcgcctgtagtcccagctactcgggaggctgaggcacaagaattgcttgaaccgggtaggcagaggttgcagtgagtaaagatcacggcactacactccagcctgggtaacagagtgagactctgtctcaaaaaaaaaaaaaaaaaaaaaaaggtttaagaaacactacttctaggccaggcacacacatggaatcccagcattctgggaggccaaggtaggaggatcacttgaagccaggagttcaagatcagcctaggcaacataatgaaacctcaaccaaaattaaaaattagctgggcatgatagcacgtgtctgtagtcccagctactcaggaggttgaggcaggaggatcgcttgaacccaagagttgtaggctgcagtgagctatgatcacgccagtgcagatcatgcctggtgacatagggggaccatctcaaggaagaaaggaaggaaagaaagggaaaggaagaaagaaaagaaaaaaggaaaggaaggaaggaaaggaaaaaaaggaaagaaaggaaggaaaagaaaaaagggccgggcaccatagctcatgcctgtaatcccagcactttgggaggccgaggtgggtggatcacctgaggtcaggagttctacaccagcctgaccaacatagtgaaactctgtcactactaaaaatacaaaattagcagggcatggtggcacatcctgtagtcccagctacttgggaggctgaggcaggagaatcaattgaatcccggaggcagagtttgcagtgagccaagatcatgccgttgcactctggcctgggcaataagagagaaactccaccacaaaaaagaaaagaaggggccgggcgcggtggctcacgcctgtaatcccagcattttgggaggccaaggcgggcagatcacccaaggtcaggagttcaagaccagcctggccaaaacagtgaaaccttgtctttgtaaaaatacaaaaaaattagtcaggcgtggtggggtgcacctgtaatcccagctactcaggaggctgaggcaggagaatggcttgaacccaggaggtggaggttgcagtgagctgatatcacaccactgcactccagcctaggtgactgagtgaaacttcgtctcagaaaaaaaaaaaaaagagagaaggggaggggaggggaaggggaaggggaaggggaaggggaaagggaagggaccacttctaaaaactgaaatagccgggtgcagtggctcatgcctgtaatcccagcactttgggaggccaaggtgggtggatcctgaggtcaggagctcgagaccagcctggtcaacatagtgaaaccctgtctctactaaaaatacaaaaaattagccaggcatggtggcacacctgtagtcccagctactcgggaggctgaggcaggagaatcacttgaacccgggaggtggaggttgtggtgagccaagatcacgtcactgcactccagacggggcaacaaagcgagacttcgtctcaaaaaaaaaaaaaaaaaaaaaaacaactgaaataggactcaaatatctaaaaacagcaaagacttcgtacagtacactgttagaaaatgttacagcctgaatctgtgtgtccctcccaaaattcatatactgaaattctaactcctaatgtcgttgcattaggaggtggcatctttgggaggtaatcggggttagagaccatgagggtggtgccctcataaatgggattagcacctttagaagaaatgacaggagacagcttgcttcctctctcctctgccttgtgaggatataatgagagatgatgatctgaaaaccacaaagcaggcccttaccagacactacatctgccagcacttgaacttggacttcccagcctccagaactgtgaaaactacatgtgtgctgttcaagccacccagcctatggcaatgtattacagcatccccaggtgactaagacagtacagcactttctcaaccatacatcagggttatgaaataattaggacactatggcagtagcagaaagataaaccaaagaaatatgggaaattctgaaaccagggcatctatgtagggtatgtgaacctatgacagagcaggtatggtcagtcagggacagaaacgacggacagttaaaccccagcagcagtgataacccatcttctgccatcatctccacataatgttgtgaattcagtgtagagctgtctattgcagtgaattcttaaaattgtatgctacctcagaagccactttgaatatggctttaactttctcataccagaagcagggcttagtcacccttaatacagtttccagttctacgcctcctcccatttcctccatgtggtcaatccagttatctgccttacacagccgcctccctgtgaccacctccgcatgagacggctagatacaaactgctggaaatcatccaactgaccctacacaaggaatgcacagagaggctgcagggaccacctctcagtcaccatgtgactccacgaaattcccatctggttgctctaaactcaccaactagaactcccacagagtctccaataaaggcatctgcccagattcctctgtcttgctccctggttaggtgtgtatatcaggtctgaaacagccaccctcttcctgttggcctacaaggagaactatcctttctctctgggatctattacctagcagcctgtttcacccacagtcacaaggaaacccacattcagaaggttaaacaagcctgaggaccattcatgtgaagatgtggcccactcctaagagatgagtgagggagccgggtgtggtggctcatgcttgtaatcccagcactttgggaggccaaggcgggtggatcacctgaggtcaggagtttgagaccagcctggccaacacggagaaaccccccgtctctactaaaaatacaaaaaattagctgggcgtggtggcgcatgcctataatcccagctactcaggaggctgaggtaggagaatcacttgaacccaggaggcggaggttgtggtgagccaagatcgcaccattgcactccagcctgggcaacaagagcaaaattccgtctcaaaaaaaaaaaaaaaaaaaagaaatgagtgagggaaacatcctgggagctccacgcaccctactctcctctcctcatgatgtgattcacggtctcgattctcaccagtgaccagatgtttacctggagtcagtttaaggttctgacctctggtgtcctttctgtgacacccgaagtgtaaacaccgaccagttctaacagcaggtgtctaacagttcagttctgacaccactcagaattaggacagacctacaagttcagggctcagtctcacaacatgccagttcacatgccagtcacaagccgcagggccacccacacttctgaacaactgtgtacaaatcgtgagctcccataatctcctcctcgggttcaataatttgctaaaactattcaaagaacttagcaaaacatgttacttaagtataactcaggaacaggcaaataagagctgaaaaatggcagggaaaggggggtggatataggcaacgctcctcatcttggggtgcaccaccctcccagcacatcaatgtcctcatcaacctggaagtactctctgaatgtctttgctcaaaaatttttacacaactcaatctccagcctccactctttcctggggtagggaatggagcttaaagcaacaaccctctagtcatgggtttggtctttctggtcaccagtctccactctgaaagtatccaggggttccacagaatcacctcattagcttaaaactcaagtatggtctgaaaggggattgttgtgaataacaaaacacactccacctatcacttagggaattccaagggttttaggatccctgtcccaggaactgcagacaaacaccaaatatatttattacaccacagaagcaaatacactcgtaaattcataaaccttttctccagcagaaagaagccaaaggtgtctttctctaagtctgaccctcacagacatttgcagaaattacactctgactaaaccaactctgtggatacaaaaccaaattgctgacaatgttgaattttacccaagctctataatcctacagaatagctatgattaaaacactctccaccaccaccaccacccttggtgttccagagaagcagcatactgcgggggaaaaaaccctattactaatttagacgtcctttattttacctataagaaagccagacaggcggctgggtgcagtggctcacgcctgtaatcccagcactctgggaggccgaggtggacggatcacgaggtcaagaatcaagatcatcctggctaacacggtgaaaccccgtctctactaaaaatacaaaaaaaaaattagccaggaatggtggtgggcacctgtagtccaggctactcgggaggctgaggcaggagaatggcgtgaacccaggaggtggagcttgcagtgagccaagatcgcgccactgcactccagcctgggtgacagagcaagactctgtctcaaaaaagaaaaaacaaaacagactctccaaattcccattgtttacttcataaacaattggctggacagttttgtcttcactgatcagtcaaaacaaaatatctctaaatccaaccttaatggttaagtttctctcctcctttcagccctgaactttgacccatcctccacagcctaaggaagcacccacccaatccctcctttataaaccatcctaaaaacagactaacctcaggaaaaatattctctgacctaggatccgattttgcactttccactctgccctctcctcccacctattcctaatcttatttgttcctccccatgaatgaaaaacttttttaggggaagaggaggggagacagggtcttgctctgttgtccaggctagagtacaatgccagaatcattgctcactggagccttgatcttctgggctcaagggatcctcccacctcagcctcggctgggactataggtgtgcaccaccacaattttttttaattttgtagagagatggtcttactatgtgtacaggttagtctcaaactcctgacctcaagcaatcctcctgtttcggcctcccaaagtgctgggattatagatgtaagccgccacttccaccagaaaagcctttttctgcctaacctctgggatgcttgcagatcttgtatctactgctttcaccttttcgttatactcctttcacataaagtcacttcttacctaactccggatttcttgtatttgaggatgtctagaaacaactctctcaaatcatgggagcccatggtttactgttattatctgaacaattaactattacaacctcagacagggtatcaccctcccaactatgcctatgtgtgcatccccagcttcccagtggtctgtagcttctctcagtataaaggacccctcccctggttggagtgataaggctgggatgcctgccaagttctacccaggaagaaccaactgggacttcaatgacctccctttgcaggctcttagttgggagtcactctgaggcacacttggcctcagacctctgcttccttagacaagactatattcacttactttttttttttttttttgagactgagtttcactcttgttgctcaggctggagtgcagtggcacgatctcggctcaccgcaacttccgcctgctgggttcaagcaattctcctgcctcagcctcccgagtagctgggattacaggcatgcgccaccatgcccggctaattttgtatttttagtagaaacagggtttctccatgttggtcaggctggtctcaaactcacctcaggtgatccacccacctcagcctcccaaagggctgggattacaggcatgagccaccacgcccagtttcacttatttttaagtaagaaaatatcctgtgtttgaagaatccagcaaaatcactcaaacttaccatttatgtatataggaggaaaggaaactgtaagacatttgtattctttttttttttttttttgagacggagtctagctctgtcgcccaggctggagtccagtggcacgatcccggctcactgcaacctccgcctcccgggttcacgtcattctcctgcctcagccacccagcagctgggactacaggcacacaccgccacacccggctaatttttgtatttttagtagagaccgggtttcactgtgttagccaggatggtttccatctcctgaccttgtgatccgcacaccttggcctcccaaagtgctgggattaaaggcgtgagccaccgtgcccggccaattttttgtattttttagtagagacggggtttcaccatgttagccaggatggtcgcgatctcctgacctcgtgatccacctgccttggtgctgggataacaggcgtcagccatcgcggctggcaagacatttgtattctatagcttaaacatgaaaagcacatttatctatccctttcagacaatagagacctcacattattgttacttccatgacaacttctttactaatatttaattcactaatatttaatatttcaaagtcccatctgataggatttagcattaatcaccaaagtccagatgaaaggatacagaacagttatccattacgacaaaatctctaccctgcaaaggagaagatattttagagaatctctgtatttcaccaattaatgtggaaatgtattcgtttctctgtagccataatggaagactgaatttccctacttatctgagattcttatccgcagtagcattctcaaggctaagttctgggattgatctgaaatcacccaaaagaagaaaatagacctgagaaacctaccatacatgttgcggagaggaaactacacaaataagattttttaacaaattgaatgtaagactagataattgttttccctcaaatctactttctgcctctttctcccctttgtgaccctccctttgcaaacactttatcttgtctttcaagcactactgataaaatacattctacatttaatgaaaaacaggatcaaataagcaaataaaccttttcaagggtttacaaacccagggagaggcaatgctgacctggaatacagacatttatctgattccaatgtcaggtgaggtcaccctatcccctaggacatctcccagccccaccctggctcactgagtgctcagtgaccaacctccctgaagacagtgaattgtgccctgctcactctgccccaagcgcattttaactttcaggttctcgcaccatttcaatggggcaggttttccttctcctttgagatagttttcctcccttcactagactaaaaacaatccagaggtcaggaatcatttgtgtcttttcctctcagtaacagcctaagattgggtaaccatcaatgtgtccctaaggaacggaaactggggttgaggaagaaaagctgagcgtcccaaagggtaaacttttcagaggaaggggataccgggagactcctcccacctcagggcatacagctgctcccgtgagaggccccacccctacaccttaagctgtcctctgggaggagtgacccaggggttgataatcactagatcctccaagagaagtggcagctgtgggtatcctgggtcaggcccaggcagttctgaaaatcaggaccaggaaaagatagagggccacatcaccttgtaaagtttccaaaggggaaactccacccaaagacattctgattaggcgtcggggcttaggaaagataaaaggaggggaagcacaaaaatttttttaccacggccgggcgcggtggctcacgcctgtaatcccagcactttgggaggccgaggcaggcggatcacctgaggtcgggagttcgagaccagcctggccaacatggagaaaccctgtctctactaaaaatacaaaattagccgggcatggtggcgcatgcctgtaatcccagttacacgggaggctgaggcaggagaatcgcttgaacccaggaggtggaggttgcagtgagctgagatcgcgccattgcactccagcctgggcaataagagcgaaactctgtctcaaaaaaaaaaaaaaattttaccgtagagtgtcaggttcttattctccgtttccctctcaggttacaagtacacaaacaagaggccgggcgcggtggctcacgtctgtaataccagcattttgggaggcggaggtgagcggatcacctgaggtctggagtttgagaccaacctggccaacatggagaaacccagtttctaccaaaaatacaaaaagtagccggtcgtggcggcgcatgcctgtaatcccagttactcaggaggctgaggcaggagaattgcttgaacccggaaggcgaaggttgcagtgagctgagatcttcccactgcactccagcctgggcgacagagcgaaactctgtctgaaaagaaaaaaaaaacaacaaacagaaaacaaatcctttcaaaagagtatggtgaaagaaactataaacaactaaaatactgtgtcttaaatgtcaaacaaaaaacagctgataatgttgatttggcgaggggaggtcacctttgggaatgcggggaaggaaccggaaatttaggcatttatttccagccccagaaaaagctaggctaaaaaaaacgggagtcgtaggtttgagattctttttccagtacgtttggaagactcggaggaagaccagtcccccggaaaaaaagacgatgtactgggaaggccacagcccacagctcttcccatgcacgaaccgcacacccgagacgggattccgccttatgaccctcccgtgtcccagtacaaacaatctggagagaggcggggctgcgggcgcggagctgcccagacagggctccgaggccgaggccgcagtcgccgcgcagggacgggacaggacgcctggggtactggctacggcccaacccaccctgcggccgaggggacagagggccgagctgcgccagggaactcgggtcccagaccctggagtcgctgcagggaggccagggtgcttccacagccggttccggccggttcccacaagcccctcccccagtctccaggcgcccggccccgcacacgcaccatttcctggcttccagggtgtcccggggtcctgcctacggctctctccggcctgtgcaggtcccagcgcgccagacgctgcggtggagccaccggggccactggagaagcggagaccggaacccaaacgcagcggacacgaaacaggaagaccccgcggagttgttgaacattgcccctgtcccccttgcagagttcctgattggatggtttgcaggttcccgccccagtgcccctgattgggtgatgattcaagtcctgcccccttggtactgagtgacaggagaagcaatgcggtatgtggctgagtaaagacagattgacagggtcttggccactgcccttcgcgggccgggcttcctccttctgtaaccttctgtgccggggaggatatttgcatttaagcagaaagtgtttcaggctctgcagaggtgacactggcgtgtttctgcactcagggtgcccttcctgccttttcctcccggacacagagtcacaagtgtgcacagggaatgacagactcggcgtccagtggagccatcccctggcctcggagtaggaggcgcgcccaggccaggccagaccacagtgtaacaggagggaggagggcttgcttctttcaggcaagaaaattaaaacggacaaagaaataaaagtattaaatgtataggaaaaactggagtttttatgacagcgatcatctataaagaaaccaagagaagtaagcaaacatttgaactagctcagacaagcagcctgcttcacccgcagttcacaaggaaaacccacaatcataacgttaaaaatattcccaagcgccgggcgcggtggctcacgcctgtaatcccagaactttggaaggccaaggtgagaaaattgcttaaggtcaggagttcaagaccagcctaaccaacatggtgaaaccccatctctactaaaaatacaaaaattagccaggcgtggtggcaggtgcctgtaatcccagcaactcgggaagctgaggtacgagaatcgcttgaacctgggagggggaagttgcagtgagccgagatagcgccattgcactccagcctgggcgacagagcgagactaaaaaatgaaatatgaaatgaaatgaaataatgaaatgaagaaatgaaatataaaataaaataatcccaagcttgggacccagactctaactgctgaaatggaaccccagtgtggatcagaacctggtgatgagacagggacacttaagaattcaactttgggagctcaaggtgccctccagtcctctcctcacagtgtggaaacactctttccttcaaaaccttcatttgtaccagcaggaaactctcacccggagtcaatgtaaagtcgtgacctaaataaattgtcatgttcccaaaccttttctccaggggacaatgcaaacaagtttttcactgagtctgaccctcacagattttcttcatgtatacaaattacagcctgactcagcgaccccatgaatgctaaaaccaaaacactgtccaggaaatggccccaggcgccaaaggtacaacctcagaaaagacagaaccctccacccccaacccaaccacatctgcacatgggtctcctgcttttcacagctctgcagcttctcagaatccacattcctggccaggcgcggtggctcacgccagcactttgagaggcccaggcgggcggatcacctgaggtcaggagttcgagaccagcctggccaaatggtgaaacctcgtctatagtaaaaatacaaaaattagccgggcgtggtggcgcgtgcctgtaatcccagccactcgggaggctgaggcaggagaaccgcttgaacccgggaggcagaggttgcagtaagcccagactgcgccactgcactccagcctgggtgccaaaacagtgagactctgcctcaaaaaaataataaaagtaaaaaataaaattaaaattaaaaaaagaatctgcactcctgagcagctggaggccacctgcaagggcgggcaggctgcccaagaagcaccctttccctctctttgcaggctccagactggtctcaggctctcctgcccactgcagtttattcacttgcttctcaccaacactgatccacttaggtaagaaaaaagaccttcaatcccctttgctgtttgtttgtttttaagaaactagcagagttcctgctttccttctgtggttatgtataagctggaagacaaaaaattctaaaatactttatatggattttaaaactggcaagtaatgattcctttgagaaaacaaagatatcagctatgctattatgatttatacattggtttccatccatgcttcctgactcataactcccatagtccttgttacagtaaacagaaactctctctctctgaccttctcctgccccccattcacctgtccactgcagaactctaatgtgatcgtgggtcataagactctcactccaaagagtgtcctgtcctgtacgctggggaaaggaatgctacacagaagccaaaaattatctggacaggggttggatgcagtggttcacgcctgtaatcccagcactttgggaggctgcggagggaggattgctcgagcccaggaattcaagaccagcctgggaaagatgtcgagaccccatctctatgaaaaataaataaaaaggccggacgcggtggctcatgcctataatcccagcacttcaggaggctgaggtgggcggatcatgaggtcaagagatcgagaccctcctggccaacatggtgaaacccccgtctctactaaaaatacaaaaattagctgggcgtggtggcgcgtgcctgtagtcccagctacttgtagtcccagctacttgggaggctgagccaggagaatcacttgaacccaggaggcagaggttgcagtgagccgagatcactactgcactgcagcctggccgacagagtgagactccgtctcagaaaaaaatatttttctttttatgtattattattattattttgagacggagtcttgctctgtcgccaggctggagtgcagtggcgagatctcaagttgctcactgcaacttccgactcctagggttcaagcgattctcctgccccagcctcctgagtagctgggattacaagtgtgtgccactaagcctggctaatttttgtatttttagtagagatggggtttcaccatattggccagactggtcctgagctcctgacatcaagagatccacccgcctccgcctcccaaagtgatgggattacaggcaagagccactgtgcccagcctaataattttttgtctcctttctttaaaactgttttaggtgtggcgtcacatggcgtggcagcacatggtgtggtggtacatgcctgtaatcccagctactcaggaggctgaggcaggagaatcattgaacccaccaggcagaggttgcagtgagccgagatcttgccactgcacttcagcctgggtgacagagcaagaccctgtcgaaagaaagaaagaaagagagggagggagggagggggagagagagagaaagaaaaagaaagaaagagagaggagaggagagaaaagaaagagagaaagagggagggccgggtgcagtgcggtggctcacgcctgtaatcccagcactttgggaggccggggtgggtggattgcctgagctcgggagttcgagaccagcctggccaacatggcgaaatcccgtctctactaaaaatacaaaaaattagctgggcgtggtggcgggcgcctgtactcccagctactcgggaggctgaggcacgagaatcacttgaacctgggaggtggaggttgcagtgagtcaagatcgtgccactgcactccagcctgggtgacagagtgagactccatctcaaaaaaaaaaaaaaaaagagagagagaaagaaagaagggagggaaggaaagagagagaaagagaaagaagaaggaaggaagaaagaaagaaaggaaggaaggaaggaaggaaggattataccagtgctggggaggacataagagaaactggattctactcctactcctactcctactttggtggtggaaatgtaaaatggtacagagagcgcggtgagacgcagagtgcggccggcttgccgagtcccaagcaggcaggtgagctggagggcggggatgtcccgggacaggccgcggcccctgccccgcagacaccggggccctcgctgtgccgggcacagacgaagccccagccgagacgcagcgcctccaggtggctgcgggagcggcgggcgggaagcggggcggtcgcgatggggcgtcagggtgcagagggccctggaggcggtctagggacacaggctcggccgccttgctttagaccaggaagccgcgcagatccgggacctgggggacctctctgtcccagtggggcgagacctacctagccctgacgatagcggagaatagccttaaccggcctggaaggtgaacgagtcccctgactacgagtggaacgattagcggccatgcggctgttcgccttcgttctaccagaccttcatgtggaagagagaaatggtaaaatggcctggcacatgtggtcctgggaaatccccagcaccctttgggaagatttactgaccgtctatagaaggcctgtgtaggccaggcacggtggtggctcacgcctgtaatcacagcactttgggaggccaaggcggatggatcacctgaggtcgggagttcaagaccagcctgaccaacatggtgaaacccggtctctactaaaaatacaaaaattagtcgggcgtggtggcggacgcctgtaatcccagcttctcgggaggctgaggcaggagaatcacttgcagtgagccgagctcgcaccattgcactctagcctgggcaacaagagtgaaactccagctcaaaaaaaaaagaagaagaaggcctgtgtctataataggaaaaagctgctcaacttctccctcaacctaaaattttttttatttatttaattttatttgtttgagacagagtctttctctgttgcccaggctggagtgcagtagcgcaatcttagctcactgcaacctccgcctcccgggttcaagtgattctcctgcctcagcctcccaagtagctggtactacaggccacaccaccacgcccggctaatttttatatttttagtagacggggtttcactatgttggtcaggctactctcgaccccctgacctcgtgatccgcccgcctcagcctcccaaagtgctgggattacaggcgtgagcaaccgctcccgggtttgtttgttttgtttgtttgtttgttttgagacagagtctcactctgtcgctcaggctggagtgcaatggcaggatgtcagctcactgcaacctccacgtcgcgggttcaagtgattcttctgcctcagcctcccaggcagctgggattacaggcacccaccaccacgccccactaatttttttgtatttttgtagaaattgggtttcaccacatttgccaggctggtctcaaactcctgacctcaggtgatctgctggcctcagcctcccaaactgctgggattacaggtgcaagccaaggcgcctggcctttcctaggaattttaaaacaaaatatgcaaaatatattcatttacgaactctacatttgtcattgcactccagcctgggcaacaagaacgaaactccgtctcaaaaataaataaataaataaataaaaataaaaaataaaattcctatgaaatattgtcttctgaaaatttgagcatttttgcccactgggttgatggagacagaaagggttctaggccagaatgttcatatttggaagactttcaaattataactgttgtcacatgtttgcagtttattcaagactgctgttacatagtggaaaaattaactccttacttcaaatgtctagtctacctagatgtttggaagtgtcccacgtatattaaatatagaggtagtgaaatatcactgtaaatatctttttgttaaaatttataggaaacactgccttttggaaattgaattgtttaaccacctttgtgagcagtgtagtactgtgtatagttgttcgatagtttagaggaggtgggagggaagaaattgcaaaaggtaataggccagtgtgttcataattggacattttcagacactatttttctgtatgttttgtgcattttgttttgctctgtatatagcatatacaatgggcaaatgcatcctgattttgcaacatctaattgctggatgttaaagaggttgccagtgtgtgataaagtacttagtaaatttagcatattttgtatactttgtgttgaaattcataggaaacttgtcttctgtggatgacttttggataggagtttgttcaaccatctctaagcattacacatgcgtgtacttgtccactggattgaaagcagagagaaggaagtgaggagggaatggttcaaggccaaaatggtcatatttaggagatacctcagattataaccacggttacatgtgtggaattttatttaacagtgcgtgtacatggtggacaagttagatgaaatatctagtatttctagatatttggaagtgcttcatgtatttaaaagtagtagtagcataacactgttttttgtttttgtttttgttgagacggagtctcactctgtcacccaggctggagtgcagtggcacgatatcggctcattgcaacctccgcctcctgggctcaagcaattctcctgcctcagcctcctgagtagctgggattacaggggtgcaccaccatgcccagctaccttttgtgtttttagtagagacagggtttcaccatgttggctaggctggtcttgaactcctgacctcagatgatccacccacctaggcctcccaaagtgcttggattacaggcatgagccactgcgcccggcaaataatactttttgtaaataacttttaaaaactgatggggctggggccaggcacggtggctcacgcctgtaatcccagcactttgggagtccaaggcaggtggatcacgaggtcaggagatcgagaccatcctggctaacatggtgaaaccctgtctctactaaaaatacaaaaaattagccaggcgtggtggtgggtgcctgtagtcccagctacttgggaggctgaggcaggagaatggcgtgaacctgggagacggagcttgcagtgagctgagactgcgccactgcactccagcctgggtgacagagcgagactgtgtctcaaaaaaaaaaacaaaaaaaaaaaaacaactgatggggcacagtggctcacgcctgtaatcccaacactttgggtggctgaggctggtgaatcatttgaggtcaggagttccagaacagcctggccaacatggcgaaaccctgtctctactgaaaacacaaaaagtagctaggcttggtggtgagtgcctgtaatccctcagctactcaggaggctgaggcacgagaaccgcttgaacccaggaggcagagactgcagtgagctgagatcgtgccactgcactccaacctaggtgacagagtgagactctgtctcaaaaaataaaaaaagaaaaaaaactggtgggaaatactctttggaagtagaattgttgaaccacctctgtgaacagtgtactctctgtacttgttcattgggttgacggaggtgggtgagatgaaatttcctgattaggacattgtactacagctatgcaacatgttaccattgagagaaaatggctgtataatttcctacatgtgaatatgcaatgacctcaaaataaatttttgttaaaaagtacaccactggccaggtgcggtggctcacgcctgtaatcccagcactttgggaggccgaggtgggtggatcaggaggtcaggagatggagaccatcctggctaacatggtgaaaccccgtctctactaaaaatacaaaaaatttgccgggtgtggtggcgggagcctgtagttccagctactcgggaggctgaggcaggagactggcgtgaacccaggaggcagagcttgcagtgagcggagatcgcaccactgcactccagcctgggcaagagagcgagactccatctccaaaaaaaaaaagtataccactggattctgcaaacctcccgagcacacgtcggtagccggctccctggctgtctgaattaccaagctgtctccccagctgtatttccaaaatgtcgctttctaacaagctgatgctggacaagctggacgtgaaagggaagccggtcgttatgagagtcgacttcaattttcctatgaagaacaaccaggtaacaaacaactggaggattaaggctgctgtcccaagcatcaaattctgcttggacaatggatccaagtcagtagtccttataagccacctaggttggcctgatggtgtccctatgcctgacaagtactcctcagagccagttgctgtagaactcaaatctctgctgggcaaggatgttctgttcttgaaggactgtgtaggcccagaagtggagaaagcctgtaccaacccagctgctgggtctgtcatcctgcgggagaacctccgctttcatgtggaggaagagggaagggaaaagatgcttctgggaacaaggctaatgctgatccagccaaattagaagctttccaagcttcacttcccaagctaggggaagtctatgtcaatgatgcttttggcactgctcacagagcccacagctccatggcagaagtcaatctgccacagaaggctggtggttttttgatgaagaaggagctgaactactttgccgaggccttggagagcccagagcgacccttcctggccatcctgggcagaactaaagttgcagacaagatccagctgatcaagaacatgctgggcaaagtcaatgagatgattattggtagtggaatggcttgtaccttccttaaggtgctcagcaacatggagattggcacttctctgtttgatgaagagggagccaagactgtcaaagacctaatgtccaaagctgagaagaatggtgtgaagattatcttgcctgttgactttgtcactgctggcaagtttgatgagaataccaagactggccaagccactgtggcttctggcatacctgctggctggctgggcttggactgtggccctgaaagcagcaagaagtatgctggggctgtcactcaggctaagcagattgtgtggaatggtcctgtggggttttttggggttttttgtttgtttgttttttgagatggagtctcactctgtcacccaggctggagtgcaatggcgcggtcttggctcactgcaacctccacctccctgattcaagtgattctcctgcctcagcctccccagtagctgggactactggtgcgtgccaccacgcccggctaatttttgtatttttagtagagaccggtgtttcaccatgttgaccaggctggtctcgaactactgacctcatgatctgcccacctcggcctcccaaagtgctgggattacaggcatgagccaccgcgcccggccttctgtaggggtttttgaatgggaagcttttgcccggggaaccaaagccctcatggatgaggtggtggagacactgccacttgctgtgtagaatggaacatggaggataaagtcagccaggtgagcactgggggtggtgccggtttagagctcctagaaggtaaagtccatcctggggttgatactcttggcaatatttagtactttcctgccttttagttcctgtgcacagcccctaagtcaacttagcattttctgcatctccacttggcattagctaaaactttccatgtcaagattcagctagtggccaagagatgcagtgccgggaacccttaaatggttacacagaatctcagctcatctctactgcaaaaattcaaaaagtgaggtgagaggatcgcttgatcctgggaggttgaggctgcaatgagccataatcttgccactgcactacctgggagtgacaccctgtctcgaaacaacaacaacaacaacaacaaactggcactccacattcaaagggaagagaattaaactccatttaaagggactaaacgtttctgtctcccacctccaataaattaatataataaatccctactctccagtgtgctggtatttgcagatggggcctctgggagataattggtgaggtcttgagggtggggcacgcatgatggaatgagttaccttataagaagagacaccagggccgggcgcggtggctcccgcctgtaatcccagcactttgggaggccgaggtgggtggatcatgaggtcaggagatcgagaccattgtggctaacactgtgaaaccccatctctactaaaactacaaaaaattagccgggcatggtggcgggcacctgtagtcccagctacttgggaggctgaggcaggagagtggcgtgaacccaggaggcggagcttgcagtaagccgagatcgcgccactgcactccagcctgggccacagagtaagactctgtctcaaaaaaaaaaaaagaagagacaccaggctgggcgtggtggctcacacctgtaatcccagcactttgggaagctgaggcaggaggatcctttgagcccaagagtttgaggttgcagtgagctatgattgtgccacagcactccagcctgcgtgacaaagcgagaccctgtctcaataataataataataggctgagtgtagtggttcacacctgtaatcccagcattttgggaggcctaggtgggcggatcacctgagaacaggagttcgagacagtctggccaaaatggtgaaaccccatctctactaaagatacaaaaattagccgggcatggtggtgggcacctgtaatcccagctacttcggaggctgagacaggagaatcacttgacctcaggaggcagaggttgcagtgagccaagatcgcaccactgcacttcatcctggacgacagagtgagactctgtctcaaataatactactactaataaataataataataatgaaaaaacaccagagacctctctttctctctgtctttctctctgtcacccctatgccctcttcccaacttgaggacacaaccagaaagtagccatctttgagccaggaagaaagccctcaccaagaacagaatctactgtcattttgaccttggacttcatggtgtcaagaatcgtattttgttattgtattttgttattttgtaatcgtattgtattttgttatagtggctcaagtagagtaaaagacagaaatggcaagaaagttaaacccatcccactagaggtttgtcatggaggggacagagcgttgggtttaggcctgagctttggagttggaaagaattgagttcatacttaggcggggaccttgaacaagtcccttgagttctctaaacctcaatagccccttctgtaaaacgaagataataaagttgttgtgagtgcaccttgaaactgcaagacacatgtcttagcaccaggtaggcactcaataaatagaggtagtgctattctttttattaatgtctttctagttggtcatgctaatgatatagtgggacaggcagaactgggtcttcaagacttcaggtgccaggctgaggagcttggacttgcacttgagagcactagggagccatgggaggtgtgtgagcagggaagagagagaaaaatgtccctttggtgccgaggtgaatgactaggaattgaagtttgggagaccaaggaggacactttgacaggtacccaggtgagtgtctagacctgggtggtggcaattgggatgatgggagtgagaagaaataagtaggtcaggcttggtggctcatgcctgtaatcccagcactttgggaggccaaggtgggtggataacctgcggtcaggaattcaagaccagcctggccaacatggtgaaaccctgtctctactaaaaatacaaaaattacccaggtggggccaggtgcagtggctcacgcctgtaatcccagcactttgggaggccgaggcgggcagatcacaaggtcaggagttcaagactgggctgaccgacatggtgaaactcttgtctctactaaaaatacaaaaattagccaggcgtggtggtgcgtgtctgtaatcccagctactcgggaggctgaggcaggagaattgtttcaacccgggaagtggaggttgcagtgagccgagatcatgctactgcactccagcctgggcaacaagagtgaaactctgtctcagaaaaagaaaaaaaaaattatccaggcatggtggcaggtacctgtaatcacagctgccagggaggctgaggcaggagaatcacatgaacccgggaggtgaaggttgcagtgagccgagatcgcgctactgcactccagcctgggtgacagagtgagactccgtctcaaaataataataataataataaataaataaatacataaataagtagttaagtagttcaagatgagtattgggtatagggcttgaatggtagctccacgacccaggtcggaagtagcagttaagaggggttggggtcggggtatcaatgtcagttttcactttgcctagaatattttttcttgttgtgtcttcctgaaatattcttactggtctttggagacactgcccaaagatccctcctctgagaatctccctggaacatgtgtggtcctgcaaagctgctgctcatgatgttatcctacaaacatccaaatcccggcatatgagtttctctagggcagtctctggctggttccattgtaggatctgtccacgccctgcatatgcctggtaccaaaaaaggaaactgggtctgcaggacgttgctgcagttcaggcattggccgcgtgggggcagaagtgcacaggtcaaagcgtctggaaaaagccctcaggctgcaggaccagcagagcatcaccaaggacgtccctggttgagaactacgtctttttattcgttttaaaggggcgcataggcactaggatccagttttgtccacctaacccacccacccagcgacacacgccccgcagcccatagctggaggatatttacgcaaaacctaaatcagatcagtctttcctttgctcagaacattttttttttttgagggacggagtcttgctctgtcgcccagactggagtgcaatggtgcaatctcggcttactacaacctccacctcccaggttcatgtaactctcctgcctcagcctcccgaatagctgggattacagatgtgagccaccacgcccagctagtttttgtatttttaatagagacggggtttcaccacgttggtcgggctggtctcgaactcctgacctcaagtgatccacccgcctcggcctcccaaagtgccgggattacaggcatgagccatcgcgcccagcctgctcagaaccatttgtggctcccacttaacccagtgggagtgctgaaataacttaaacattttacatggcatttacaaatgcgatattttattctttaatcctttaaaatctctccatcaataaaactcttcagaagtccttaccagttgttacaaatctaaaatataaatatacaaataagtggtaatgtatgttctctcaaacattctgacactacttctacactcaaccaaattgtgatatacttttccatttaaaattaccagtcttggccggacgtggtggctcacgcctgtaatcccagtactttgggaggccaaggcgggtggatcaactgaggtcaggagttcaagaccagcctggccaacatgatgaaaccccatctctactaaaaatacaaaaaagttagccaggtgtggtggccggtgcctgtaatctcagttacttgggagggtgaggcaggagaatcgcttgagcctgggaggcagaggttgcggtgagccgagatcaagccattacactccagcctgggcaacaaagcaaaactctgtcttttttttttttttttttaaaggaacctcgctctgttgccaggctggagtgcagtggcgtgatctcagctctctgcaacctccgcctcctgggttcaagcgattctcctgcctcagcctcctgagtagctgggactacaggtgtgtgccaccacgcctagctacttttttgtattcttagtagagatggggtttcaccatgttggccaggatggtctcgatctcttgaccttgtgatccacctgcctcagactcccaaagtgctgggattacaggcgtgagccaccgtgcccagcgaaactctgtctttaaaaaaaaaaaaataccagtcctggtgaggcgcagtgtctcccgcctataatcccagcactctgggaggccgaagcgtgtggatcacttgaagtcaggagttcaagaccagcctggccaatgtggtgaaaccccatctctactaaaaacacgaaaattagccgggcgttgtggtgcatgcctgtaatcccaactatttgagaggctgaggcaggagagtcacttgaacccagaaggtggaggttgcagtgagctgagatcatgtcaatgcactccagcctgggtgatagagcaagactccctctcaaaaaaaaaaaaaaaaaaaaaggccgggcgcggtggctcatgcctgtaatcctggcaccttgggaggctgaggtaggcagattgcctgagctcaggagttcaagagcagcttgggcaacatggtgaaaccctgtctctattaaaaatacaaaaattaaccaggcgtggtggcgggcgcctgtaatcatggctgcccaggaggctggggcaggagaatcacctgaacttgggaggtggaggttgcagtgagctgagattctgccagggcactccagcctaggcaacagagtgagattctgtctaaaaaaaaaaaaaaaaaaaaaaaaagccgggtgcggtggctcacgcctgtaatcccaccactttgggagatagaggctggcggatcacgaggtcaggagatcgagaccatcctggctaacacagtgaaaccctgtctctactaaaaatacaaaaaattgactataaatcatgctgctataaagacacatgcacacgtatgtttattgcggcactattcacaatagcaaagacttggaaccaacccaaatgtccaacaatgatagactagattaagaaaatgtggcacatatacaccatggaatactatgcagccataaaaaatgatgagttcatgtcctttgtacggacatggatgaaattggaaatcatcattctcagtaaactatcgcaagaacaaaaaaccaaacactgcatattctcactcataagtgggaattgaataacgagaacacatggacacaggaaggggaacatcacactctggggactgttgtggagtagggggaggggggagggatagcattaggagatatacttaatgctaaatgacgagttaatgggtgcagcacaccagcatggcacatgtatacatatgtaactaccctgcacattgtgcacatgtaccctaaaacttaaagcataataataataaaataaaataaaataaataaataaataaaaatagaaaagaactatgtaccattaaaaaaaaaaatacaaaaaattagccgggcgtggtcgtgggcgcctaaagtcccagctactcaggaggctgaggcaggagaatggcgtgaacccgggaggcagagctggcagtgagccgagattgcaccactgcactccagcctggacgacagagcgagactccgtctcaaaaaaaaaaaaaaagtattgaactgttgttgatgatgtgagcaatggagaattaggagggaagtgtacagccttgtgtaatttatattaacatgcgtaaaaatcgagatggatgaagcgatatctacaaagagattaaaacaagctgggcacggtggctcacgcctgtaatcccagcactttgggaggccgaggagggcggatcacctgaggtcgggagttcgagaccagcctgaccaccatggagaaaacctctctctactaaaaatataaaattagctgggtgtagtggcgcatgcccgtaatcccagctactcaggaggctgaagcaggagaatcccttgaacctgggaggcagaggttgcggtgaaccgagatcatgccattgcactccagcctgggcaacaagagtgaaactccatctcaaaaaaagaaaaaaaaaacacacacaaatatattcaaatattaattgcgttatctaggggtatgtgggtgtttaagagaacctaaatcctgttatccataatagctacaccattttacattcccactaacaatgaaaagcattccaaattctatggatcctcaccagcacttgttattttctgtgattttgacgaacgtgaagaattatctctttgtgcttttgatcttcatttctcttatgacttgtaatgttgaacgtctattcctatggaggctttttttttttttttttttttttgcattttttaaagacagggtctcactctctcaccctggagtgcagtagtgcaatcacagctgactgcagcctcgaactcctggactcaagagaccctcctgcgtcgatcccaaaatgctgggattataggcatgagctactgtgccggccaatatcaagacacttttccaagtgatgagaccagccatttagtctatccttaaagaactgagtcatggaaatttaatcatgtcaatagtcttttttacattattaaccaaacaaaaatgagttccttttaaagatttttttaagattaggaaatagctgggcttggtggctcaagcatgtaatcccagcactttgggaggctgattgcttaaatccaggaatttgaaactagcccagccaacatgctgaaatcctgtcttcacaaaaaaatacaaaaaattatcgaggtgaggtggcacatacctgtaatctcagctactggggaggctgaggtgggaggatcacctgagcctggggaggttgaggctgcagtgagccctgatcctaccactgcactccagcctgggcaacaaagtgagatcctgcctcccaaaaaaagttggagcggggaggctgggtgcggtggctcacgcctgtaatcccagcactttgggaggcccaggcgggtggatcatgaggtcagaagatcgagaccatcctggctaacatggtgaaaccacatctcttctaaaaatacaaaaaaaattagccgagggtggtggcgggctcctgtagtcccagctactcaggaggctgaggcaggagaatggcgtgaacccgggaggcggagcttgcagtgagccgagatcacgccactgcactccagcctgggcgaccaagcaagacaccgtctcaaaaaaaaaaaattggagcggggaggaggagccacatcaggatggtacagtggatgcctaatgattttacaataaaactctcacaaaattgttcttgttcaacaaaaggaatgtgcaggagcactgtcatggtggtgaaggactctctggtggaactttcctggatatttttctgccaaagctttggctgactttctcaaaacactcataataagcagaggtttttattctttgaccttccagaaggtcacacttagtactatgttttttgttttggcttggtttttttgagacagtctcactctgtcacccaggctggagtgcagtggcccgatctcggctcactgcaacctctgcctcccaggttcaagcgattgtactgcctcagcttcccaggtacctgggattacaggcgtacagcaccatgcccggctaatttttgtatttttggtagagatgggggttctctatcttggccaggctggtctctaaatcctggcttcaagtgatccacccaccacggcctcccgaggggctaggattacaggcgtgagacactgtgaccggctggtactatgttttgaacataggaattgtgaggcctctagctttgttcttgtttttcaagattgttttggatatttcagattcttggaagtttcatatacattttcagattcttttttctatttttgcaaaaaaatgccattgaatttgttatgaattgcattgaatctgtgcatcagtttgagtagtgatttacaattggataatttcacaatattaagtagtctaatctatgaactggggatgttgtgagaatatagagaaaaacaaatcaacacaatttctctgagtgttaggcttttccatacacacccagcaagcaattctgcagaggattcaccagctagatatcctcaaattctattcaattccaatactatctatctggagatagcatcacatcccaaagatcaaggacaatgttccacaagactgtccctcatcttagatgccagtcacaagccagggcctctagaacttctggaccaacttaaacactggggttccgaaaaccccttccttgagtttaattagtgtgatatttaatattgagtgtcaacgtgattgaaggatgcaaaatactgtccctgggtgtgtctgtgagggtgttgccaaaggagattaacatttgagtcagtggactgggggaggcagacccaccctcagtttgggtgggcaccatctaatcagctgccagcgtggctagaataaagcaggcagaagaaaatgcaaggagctgacttgttgagtcttcccgtcttcatctttctcctgtgctggatgcttcctgccctcaaacatcagacttcaaattcttcagctttgggattcttggacgtacaccagtgatttgccagggtctctcgggcctttggccacagaccgaaggctacactgtcggcttccctaacttttgaggttttgggatttagactgatccaccactggcttccttgctcctcaacttacagactatcgtgggactttaccttgtgattctgtgagtcaattctaataaactccctttcatatatacagatatcctactagtctttccctctagagaaccctgactagtacgatttgctagaacagctcagaaaactcagagaaacatattagtttaatttaccccccttttttttttctgagacggggtcttgccttgttgcccagactggtcttgaactcctgggctcaagcgatcctcccacctcagcctctcaagtagctgggactacaggctcatgccactgtgcccaattttgtttacccacttattacaaagaatattacaaaagatacaggtgaacagccagatggaagagatgtatgactctaggtgtgacacctttcaggaacctccacacgttcagctccccagaagctcccggacccaggcctttcaagttgaatggagtcatcattatgtagtcatgactgattacattattgcccattgtttatcaacttaaccttcagtccatctccccactctggaggtccaaaggaatggagctgaaagttccaatcctataatcacatggttatttcctttgctacctgcccccccatcctgaggctatccagcaggcccaagccatcagtcaactcattagcatacaaaatgtcacttatcacttttaagactcaaaaaattttaggggttatatgacaagaaacgggaagaagattgctatggtatgaagacagtagggacaccttttattagcggcctgtggaccccaagcatggaaataaagaaaaatcctgagtttaaaggaaattctaggcacctagtgaagccatgagaagcaaataagtaacttgttaaacaagaaggtaatagatctaaaacaatagctcaggaagttagaggcccagatatgtttgctttccccatataaactaagggtaagatcttttttttttttgaaagggagtcttgctctttcacccaggccagagtgcagtggcgctatctcggctcactgcaagctctgcctcctgggttcacgccattctcctgcctcagcctcctgagtagctgggactacaggcgcccgccaccgcgcctggctaattttttgtatttttagtagagacggggtttcaccgtgttcgccaggatggtctcgatctcctgacctcgtgatctgcccgcctcagcctcccaaagtgctgggattacaggcgtgagccaccacgcccggcaggataacatcttaacatacatcccggagttgtctttcagaggcttggaaccccactgaggacccccgctgaacagatccattcactggcacagactcctagataaggaagaagtgaagactaaacttgacctttgttctgtttcttccttgggggattagagaaagtcactccctgtaaccagttatttttctactgacccctgtcaggcctctgagcccaagcctgcacgaatacatccagatggcctgaagcaagtgaagaatcacaaaagaagtgaaaatagctggttcctgccttaactgacattaccttgtgaaattccttttcttggctcagaagctcctccactgagcaccttatgacccccactcctgcccgcgagaaaacaaccccctttgactgtaattttccactacctacccaaatcctataaaacagccccacccctatctcccttcactgactctttctggactcagcctgcctgcacccaggtgaaataaacagctttactgctcacacaaagcctgtttggtggtctcttcacacggacacgcgtgacaacccgatttttcttttttttaatcttatgacctcatttttctcagagatgaagtcttgttatgttgcctaggctggtcttgaaatcctggcctcaaatgatcctcttgcctaggcctcgcaaagtgctggcattacaggcatgagccaccgcacctaacttaaagttttttttttttttttgaaacggagattcactcttgttgcccaggctggagtgcaatggcgtgatctcaactcactgcaacctctacctcccgagttcaagcgattcgcctgcctcagtctcccaagtagctgggattacaggtgtgagccatttgcccagcctagcttaaatttttaaacaaaacttctctcttccttttttttttgtttgtttttgagatggagtctcgctctgttgcccaggctagagtgcaatggcgcaatcttggctcactgcaacctccgcctcccgggttcaagctattctcatgtttcagcctcccgagaagctgggattacaggcacccaccaccacgcccggctaatttttgtatttttagtagagaccagttttcgtcatgttgatcaggttggtctcgaactcctgacctcaggtgatccgccggcctcggcctcccaaagtgctgggattacaggcgtgagccaccgcgcccagcttacttctttcttccttaaccaattgcaaatgtgatctttgaatctacctgtgacttatgagccccacttcaagatattccattcttttaagcttataccactgtgtaacctccatgtactgatttatgattcttgcctgtagcctctgctttcctgaaatttacccctgccttttccgtgtgtgtctgtgtgtgtgtttcccctgctgtctttacaatactcctgcctttaaaaactcttacctgcggccaggtgcggtggcttacccctataatcccagcactttgggaggccaatgtgggcagatcacccgaggtcaggagtccaagaccagcctggccaacatggtgaaaccccatctctactaaaaatacaaaaaattagctgggcgtggtggcaggtgcctgtaatcccagctactcgggggcggggacgggggagactgaggcaggagaattgcttaaacccaggaggcagaggttgcagtgagccgagattgcaccattgcactccagcctgggtgacagagcaagattccgtctcagaaaaacaaaacaaaacaaaacaaaaaacccaaaaactcttacctgcaagctattgggagctcaagtcaggccaggtgaggtggctcactcctgtaatcccagcactttgggaggccgaggctggtggatcacaaggtcaggagatcgagaccagcctgaccaacatggtggaaccccatctctactaaaaatacaaaaaattagccaggtgtggtggcacgtgcctgtagtcccagttactcgggaggctgaggcaggagaatagcttgaactccggaggtggaggttgcagtgagctgagatcgcgccactgcactccagcctgggcgacagagtgagagtctgtctcagcactcctgcctgggccatagagcaagactctgtctcaaaataaataaataaataaattatagagtgtaccttcttacatttagtgggactcctagatataactgattcctgggattgattaatcccatgaaggattgtcagttagtgcattacagagatgttaaaattaaaaattttaacccgggaggcggagattgcagtgagccgagatcgcgcctccagcctgggcaacagggagactccatctataaataaataaataaattaattaaatggggcctagctatgctgaccaggctggtctcaacttcctgggatcaagtaatgctcccaccttgtgtcctaaagcactggcattacaggtgtgagctactatgcctggcctcacgttgacatctgatctccaaagcagctgttttgagaggtgcggccaggtggcaggtgtttgggtcaaaaaggcaactccatcacaatagattaacgcccttctgttattgctttcacaggaatggttcccacgagagtaggttattaaagggtctgtcttccttgatgtcctcttacttcctgtctcaccacgtgatctctgcacacgctggttccccttctgctttctgccgcaaatgtaggcaggtgaaaccctctccagatgcagcctgaacaagattttactaatgagaagagcatgaagtctttcatgaggcatctaccctatgacttaaacacctcccactaggcctaaaaccactacactggaccatatttcaataactatggagaagacattgaaaccctagcaggaatttcctggatgacaacagatgctttacataatttaaggatactgggatttattcaggtttgaatacgtttgttgagctacaggaatgccacaggggttgtcccttataacccagaggatcagggtctctgttgagatagaggcatgggcagcggcagcagcagaggtacttaaaggtccagctgagtgtgaacttcaggacaccatctaatggtagcttccccaccttctcttctttcgcattttttcttttttcttttttttgagatggagtctcgctctgctgcccaggtttatgtgcagtagggcaatcttagctcaccgcaacctccacctcccaggttcaagtgatactcctgcctcagtctcctgagtagctgtgattacaggtgtaaaccaccacgcctagccttctttctcacttttttttttttttttttgagacggagtcttactctgtcgcccaggctggagtgcagtggtgcgatctcggctcactgcaacctctgcctcccaggttcaagagattctactgcctcagcctcccgagtagctggcattacaggcgtccaccactatgcccagctaatttttgtatttttagtagagatggggtttcaccataatggccaggctggtctcaaacttctgacctcaggtgatctgtctgccttggcctcccaaagtggtgggattacaagcgtgagccaccaccactgcgccaggctctttctcattttcaaatgactgctctttcaggaatgaccactaatggggccccaacatgcacaagataaaatctcaccaccagcccccaccaccagacctacaggacaaggccaacacctagcatcagtcccagcttcattctacatagaaaggcaaagtgaaaactcctagcccagaccattttaaggagggcccaaatccgatactcctgctcctaaatgccaaagacttatagaaactgccatcttcggttggctaaatctggaacacaagtttgttcggcctcagcaatggaacacagagcagcaagcagcagcagctcaaagagcatgctggccaccaggtagcagagcaggttagcacctgagagaaagggaaagctgacccattgcatggtgaccaacatctagacatcctgctgacagtgccaactgttacggttgcctgaaaaggtgtgcttcagaggttgacaccgagagctatgtggtgcacacacacaccgagagtatgaaaaggcttattacaaaaatgaggtatcagagagaacaatgcagggctctcaagcaagtgtgacatggcgtgagagcaaggaagatggcattcctgtcccttatgagtactgatgcaaaaatcttgaaataaatgccagcaaagcatataaagcaatatattcaaagcattatgcaatataaccaagtgagatttgtccctggaatgtaaggatggttcaccatatggaaattgatcagtggaatacaccacattaggaaatgacggaaaaatgacagtctcaattgatgcaaaaaagcatgacataattcaacacccatttatgattaaaaatctgcaacaaacaaggaatataatttactcaaattgctacaaggcatatatgaaaaactcaataaaatctttgatggtgaaaaaccatatttttaatatctaatatcagaaacaaggatatttgctctcaccagctccattcagtgttaaggggggtgctcccagggaaatcaggcaagaaaatgcaagcattccagccgggcctggtggctcaagcctctaatcccagcactttgagaggccgaggcaggcagatcacaaggtcaggagggcgagaccatcctggccaacatggtgaaaccccgtctctactaaaaataaaaaaactagctcggtatggtggcacgcgcctgtaatcccagctactcaggaggctgaaacaggagaattgcttgaacctgggaggcagagattgcagtgagccgagatcatgccactgcagtccagcttggtgacagagcgagactgtgtctcaaaaaaacaacaaacaaacaaaataaccagccaggcagagtggctcacgcctgtaatcccagcactttggggagaccgaggtgggtggatcacaaggtcaggagattgagaccatcctggtcaacatggtgaaaccccatctctactaaaaatacaaaaaaatttagctggttgtggtggcacgcgcctatagtcccagctactcaggaggctgaggcaggagaattgcttgaacctgagaagtggaggttgcagtgagccaagattgtgccactgcactccagcctggcaacagtgagaatccatctcaaaaaaaaaaaaaaaaaaaaaaacctaaaagcattccatatttaaaaatatatataaatatatatacacacagccctctagacaaatatacaaaaatcacacacgttatcactgtacatacaggtggacagacacaaattcacaaacccacaggtgtaacagcccagatactaaaagattctcccaaatagaaggaccccaggtgttctgatctcttctccaggtttctctggctcctcgggaataaccaccacagtgccttatatatccttgcttgctttcgtgtcttccagaatgccaggatcaaggggacagagatattagcacagctttgttgactacacctattagagggagttacacagaggaaaatacttactgaatattaggactcacacagacacatacacaaaagggttttacaaaaacatcatcatagacccacatatacttgtccttcaaaaagtgaatgttctcactcccattcctgtagcagagataccccttagttccccaatacctatcacaaaagatggctccttgagcccattctgacagtgaaggaatctcgaacttcctgacctcccacagtacaataatcatctctctacaaaagcacaacatggcagctcaagaatgtgaaaggacctgaaatgggttgagtaataatgttccaacccctcatactaccataaatgttcctggtgagagaagcgaatgttcctggtgagagaagcgaaggtgtgcatctcctggctcagccaccaggtcctccactgcatctccacagtagccgtcacttccactgaggcctcatctgccagcaaaccttgctccagtcggcctctggaccctagtatcttcaccgtggttttggatgctgccacctgacccatccctgctgttgggggagggtggaggccagaggcctaaagagttccgacccgagcgacacaaagatcacttctgggacccacccagggagactgttgttacgagggtggatggtgacctggtttccctcaatgctgccacctcccttctaaaacacactgacttgctaagaaaaggggggactgactccaacaaaggacagacccgacccctatcgtgcctatgcaattcagaaaacggagaattcggaggctccagcaagcagtttattgggagttgagttcaccttgccttgtgatgtgaagcaaggtagttccatggcttgtgaaccctgacaccagcacctcccatacacaacagagctggagcgctgcagggtgggtccttttccaagaagagctaagtgctagtcttagcgggaggctaggaaaccagtcctggagcaggatgcatgtgacatgcactgacgtgagaaggccggagcatcatcagtgcatatgccgctgaatatctcagggtagaatgtgccagaaaacagggaaagcaagttaggggaggtaagaattctgagtgtcctacagctaagacatggcagagtgtgtctgtgactccactagcagttttgagattattctgactgtggtggttggtgcagggctggtaaccgcaggagagtggatgctgtgtggtcaaggggtgtgtgtcccatgatacaggctctgcttcttcagtctctcacctcagagccacctgcggttgccacagagaaattcagatgtgaatgtttaaacaagtgtccaaagtgtaggtttgagatgggaaatggagctggagatgacctcaaaacagccctggaataatgcaatgctgacaatgtctgtgaattaggatgtgcataggcagatcccacttggggaaaaactgtaagatgcgaacctttgtcttagaagtacagcattcccacagtctgacccgaggacactgatggaaacttaaaaggcagattctgggagtcttctcacttctctccagtcatgtgtgagagctgagggcaggcactgccctagagggtgtttcctaacttctgactggatgccacaaaaggcctgctggggcccaagtccttcttccccattcctttaattcttcctacgaagaatctcgacaatggttgcagatgtcattgaagatgttcccatattgcttacatttaagaaggtggctctccagtgtgggtggtttcatggttttaaaatgaactggaggccgggcgcggtggctcacgcctataatcccagcactttgggaggccgaggagggcggatcacgaggtcaggagatcaagactatcctggctaacacggtgaaaccccgtctccactaaaaatacaaaaaatgagccgggcgtggtggcgggcgcctgtagtcccagctactcgggaggctgaggcaggagaatggcgtgaacccaggaggcggagcttgcagtgagctgagatcgcgccactgcactccagcctgggcaaggactccgtctcaaaaaaaaaaaaaaagaactgggggccgggtgtggtggctcacgcctgtaatcccagcactttgggaggccaaggcaggtggattacctgaggtcaggagttcaagaccagcctggccaacatggtgaaaccccgtctctactaaaaatataaaaattagttgggcgtggtggcatgtgcctgtaatgccagctactagggggcctgaggcaggattgctttgacctgggaggcagaggttgcgccactttcactccagcctaggcaacagagtaagactccagctcaaaaaaaaaaaaaaaaaaaagtaaaacgaacaatttgggaggccaaggtgggtggatcatttgaggtcaagagtttaagatcagcctggtcaacatggtgaaacactgtctctactaaaaatataaaaattagctgggcatggtggtgggcacttgtaatcccagctacttggaaggctgaggcagaagaattgcttgaacccagaggttacagtgagccaggatcacaccactgcactccagcctggggcaacagagtgagacaccatcttggggtgcggcggggaaaaaaaggttgggtgctgtggctcacacctgtaatcccagcactttgggaggccgaggcaggcagatcacctgaggtcaggagtttgagaccagcctgaccaacatggagaaaccccatctctactaaaattacaaaattagccaggcgtggtggcgcatgcctgtaatcccagcttcttgggaggctgcggcaggagaattgcttgaatccgggaggcggaggttgcggtgagccgcgatcgcaccactgcactccagcctgggcaacaagagcaaaattacatctcaacaaaaacaaaaacaaaaaacaaaccccacaaaagatgggatggatatagaattttctttatagtttctctccagtatatattctcaggtgtctttaaaagattacgtgaagtgaaggctttcctacactccatacattcgtagcttttctgtccatggagtccattcacatatctgcaatcccgcaggagagtgcaagttcctcccccatttgttaaatatttcattgccgcatgagtcacgtcttcaaagggaattaggacaactgaaggcttaatcacaccgtttacattccttgaatttctctccagcgtaagtactctcatacatccaaaaggaactaatacaactgacagcattaccacactttactttcttagggcttctgtctactatgagtcctttcgtgcacgtgcaaagactttgagtaactgaaggctttaccacattgtctacactgaaagggtctttctccagtatgaattcttttgtgtactttcagggaatttaaacaagtgaaagctttgccacactgcttacactcacatggtttcactccagtgtgacttctttcgtgccttcgaaggtgactgaagtaaatgaagacccgaccacactgtttgcattcatagggtttctctctagtatgggttctttcatggattcgaaagtgagtggaataaagaaaggctttaccacattctttacattcgtaagttttctcgccagtgtgaactctttcgtgcaactgaaggtaacttgaagaattgaaggctttaccacattgtttacattcatagggtttttctccaaaatgagttctttcgtgcacttcacaggaactagatgacttgaaggcttccccacatttcttacatgtataaggttgaactccggtgtgggttttcacgtgttttcgaaggcttgagtgagaaaagaaggctctcccacattccctacatacaaaaggtttctctccagtatgagttttctcatgactccgtaagtacgtgggacaactgaaggctttcccacattgcttacattcataaggtttctctccagtgtgagtcctttcgtgggttagaaaaggctggtaatatataaaggcttttccacactgtttacatttgtagggtttctctccagtgtgatttttttcatggcgccgaagagcagtgagatatctgaatgccttcccacattccttacattcatagggtgtctctccagtatgaattcttatatggtttcgaaaggaaaagagaaatgcgaaggctttgccacattccttacattcatagggtttctctccagtgtgaattctttcatgggttcgaatactggagctgcgagtgaaggttttcccacattctttgcatttatgtggcttctctccatattcgtgacactcatttggtttctgttcagtgtgagatctcatgtgcctattaagggagacctgatgcatgaagacttccccacacacactgcagtcacatggttttaatccagtaggagtttccaggttcgtattaagatcaggaatctggctagtgctttttccacatggacaatcttctttattttcacagagtgcttcaaccataggacttctgtaaagaatgagtaccgtattattaatagttttgtattaatgatcttatatttattagcaagtaccagaattacattttaaatattttcacagaaactgtatgttatctgccctgtctaaattgttttgaaagctaatatactcaatagtctagaacaggccgtgaccatagctattatcaaaatagttaaaaaaaaattattattattatttttgagacggagtctctctgttgcccaggctggagtgcagtggcgtgatctcagctcactgcaacctccgcctcctgggttcaagtgattctcctgcctcagcctcccaagtagctgggattgcagacatgcaccaccacgccccgctaattttatatcttttttagtagagacggggtctcaaactcctgacctcaggtgatccgctcgcctcagcctcccaaagtgctgggattacaggcgtgagccactgcgcccagccaggatttttaaatgctgtttcatagtgatttcttctcacaccctgaacatctattgcttttttttttttcctgtagagacaggttttcactatgttgaccaggctggtgttgaactcctggcctcaagcaattctccagccttcacctaccaaaggctgggattagaggtattcgctaccttacccagccaatgacagtttctgttgtttttttagacggagtctcgctctgtcaccaggctgcagtgcagtggatcgatctcagctcactgcaacctccacctcccaggttcaagcgattctcctgcctcagcctcccgagtagctgggactataggtgcacgccaccacgcccggctaattttttgtatttttagtagagacagggtttcatcatgttggccaggatggtctcgatctcctgatctcatgatccactggcctcagcctcccaaagtgctgggattacagacatgagccaccacgcctggctgcccatgacagtttcaatgaaacaccttcagtaaaaattttctaagaatgaataaacctgaaactctgcttattgttttgcttgcttggcttttgaaatttatgaaatactaagattctctcaggggctatataattatttgtgaatgcaactcaccttagatttcttccctggtttttgtgttcatcttcaatatcctggtctttccatttttcccctaaaatacaagcccagagaactcacaataaattattagaaattatagaaaattataacactctaagatccatgattagctattgattagctatgacactgtctgatctacttactaaagtattctcttcccacattttttttttttttttgagacagagtctcgctgttgcccaggctggagtgcaatggcgcggtctcagctcactgcaacctcggcctcccgggttcaagcaattctcctgcctcagcctcctgagtagccagaattacaggcacctgccaccaggcctggctaattttttatttttagtagagacagggtttcaccatgttggtcaggctggtctcagactcctgacctcttaatccgcccgcctcagcctcccaaagcactgggattacaggcgcgagccaccgtgcctggccccttcccccattttaaaccttggaactcagttgttgtgcaagaaacacctgttccctccttaattaagtagagaaattatgtcacccttacctatacaggccaggttcttgaaggttgcccgcatcacatctctgtagatattcctctggccaggatccagcaaagcccactcctccagggtgaagttcacagccacatcctcaagggagatggagtcctaaaacatcccccatgtgtgtttaggaggaggagagagattcgcagtagtgaggatccattctcagaattcctgagaaattccatataatcctgtagtctcggtttagtggtataacttggttgtcagaactcttgactctttccatactcacttcctcataaatttaacactatcgtgaacatacaaaaattattgcgctctctctctctctctctctctctctctctctctctatatatatatatatatatatttttttttttttttttttgaaacattcttgctctgtcgcccaggctggagtgcagtggcacaatgtcggctcactgaaagctccgcctcctgggttcacaccattctcctgtctcagcctcccgagtagctgggactacaggcgcccaccaccacacccagctaattttttgtatttttagtagagacagagtttcaccgtgttagccaagatggtttccatctcctgacctcgtgatccgcccgcctcggcctcccagagtgctgggattacaggcgtgagccaccgcaccctgccattatttctatattttaactgtgatcacttgaagccttattgttctttttctttttattttttttgagatggagtcttgctctgttgctcaggctggagtgcaatggtgcgatcttggctcactgcaacctcctcctcccaggttccagtgattatcctgccccaacctcccaagtagctgggactacaggcgcgtgccaccacgcccagctaattttttgtatttttagtagagacggggtttcaccatgttagccaggatggtcttgatctcctgacctcgtgaatcgcccccctcggcctcccaaagtgctgggattacaggcgtgagccaccgcgcccggccaccttattgctctttaaatacagacccaagaccatcttggatatatgagagaaatgctgtacaaatgaaacaaattgtaagatcatcaattcctcgtgagaaaaactctttcattttctaccttattacatactgtaccactcagcatttcatgaaacttggggtcaaatctggatgagattttaataaatgaatacaccctttagactataagctgcacatctcccattgaggatgaaaaactgtgtatttttctttttcataaacaacatgagagatcaggaagtctgtgaaaagccagaagtcactggccatgttgccctgaaggatctcgggccattagaaccatgcaaatccaggtggctgaatgaaaatattcttctgcattagtattaatttcaacgtgtttgtgtaatatttatcataggttcagtttttcctttctgtctcatttcatgggtctaggaggttattggaaagaaagcacagcaacttggacctctataaacccctgtactcatgaaggtttattactcgcatgcttgagctctcaggcaaagctgtgtaactctcaagcacttgtgaagtggcttcggagagcaagaaaaggagcctggctggggatttttactgacattagggagtgggctagtgtgagttcaagcatacaggtggaggctgatgcgaattggctctgtcgccagcaccaaatgagggtgacccaggctttcttcctaccacgtccatatgtggggtacacagtggaaactgaggaatgaggttttaaagctgtgagcagtcaaaagccaggcggggtggctcacgcctataatcccagcactttgggaggcagaggtgggcagatcatttgaggtcaggagtccaagcactaaacctccagccctttttctctcccccgactttgggggctagggctagaggaagatcaagactgggtgtctttcgggacatcaatccccaccctgaagttaggtaggcattctttccagtagtcatttatttacaacaagagagggtccattacccttatcactcatgaaattccaagagatttaggaactctgtactaggaaccacacacaaagaccaaacaaatgtctttcttatcatagcaaagaacatcatggctcggggcacaggctcaccagaagacagatgattcataggattatatcatgtttccactccagccactggtaacagtgtgacattagagttttgtttttattttgagacccagtctcgctctgtcacccaggctggagtgcagtggtgcaatcttggctcactacaacccctgcctccagcattcaagcagttctcctgcctcagccaacagagtagctgggattacaggcatacacaaccacacccagctaatttttgtatttttagtagagacagggtgtttcttcatgttggccaggatggtgtcgaactcctacctcaagtaatttgcctgccttggcctcccaaaatgctaggattacaggaatgagtcaccactcctggcctgggtttttgttttaaaacagtagaacaggccaggtgtggtggctcacgactgtaatcccagcactttgggaggcggggggcgggcagatcacttgacatcaggagtttgagaccagcctggccaacatagcaaaaccccatctctactaaaaatacaaaaatttgccgggtgtggtgggcacctgtaatcccggctacttgggaggctgagggaagagaatcgcttaaacctgggaggcagaggttgcagtgagccaagatcgtgcccctgcactccagcctgggcgacagagcgaaactccacctcaaaaaataaaataaaataaaataaaataaaacagtagaatacaatgaaacaatattctatttctttctgcatgtttcacaattgaagaaatctctagagaaccccaaaaatgacagaacacagaaaaccagggacaccaaaggcaattttatctgacacctacagttactgaaaatagtaaacacagcctaaaatcaacaggataaacctaaaccctcacatttaaagcctgtttacctcagttccttttcaacaccatgcccagatctcaacaaaaattacaagatatattaaaagacttagacggtttgaagagagagtgcaggcatcagaaccagactgagatataaaagagatgctggaattatcagaccagaaatttatttcttttcttttttttttgagacagagtcttactctgttgcctaggctggattgcagtgacacaatctcagctcactgatactgtcatagtggataaaaaagaacacctggccaggcgtggctcacgcctgtaatcccagaactttgggaggccgaggcaggaggacctcttgaggtcaggagttcaagaccagcctgaccaacatggagaaaccctgtctctactaaaaatacaaaattagtcaggtgcagcggcacatgcctgtaatcccagctactcacgaggcaggagaatcacttgaacttgggaggcagaggttgcagtgaggcgagatcgcgccatggctctccagcctgggcaacaggaataaaactccatctcaaaaaaaaaaaaagaaaaagaaaaaagaatacctaatatatgttgtctgcaagaaattcgcttttttttttttttttactttgttttttagagacagggccatgctctgtcacccaggctggagtgcagttgtgggatgacagatgactataacctcaaactcctgggctcaaaggactctcacctcagcctctgagtagctggaactacaggtgtgcactaccatcccttgataattttgtttctttttatagagatggggtctcactatgttgcccaggcttgtctcaaactcctggcctcaagcaatcatcctgcctcagcctcccaaaatgctgggattacaggtgcgagccaccatacctaggccaacaaatccactttaaatatatcacaaagattggggggaggggggagggatagcattaggagatatacctaatgtaaatgaccagttaatgggtacagcacaccaacatggcacatgtacacatatgtaacaaacctgcacgttgtgcacatgtaccctagaacttaaagtataataataaaaagtaataataaataaatatatcacaaagatatattaaaaataaaggaatagagaaagatatactatgctaacactaattattattattattattttgagacaaagtctcactctgccacccaggctggagtgcagtggcgcaatcttggctcactgcaacctccacctcccgggttcaagcgattctcctgcctcagtctcctgagtagctgggattacaggcgcacactaccacacccagctaatattttttgtttgtttgtttgtttgagtcgaagtttcgctcttgttgcccaggctggagtgcgatggcgcaatctcggctcgctacaacctccgcctcccaggttcaagcgattcttctgcctcagcctcctgagtagctggaattgcaggcacctgccaccacgcctggctaatttttgtatttttagtagagacagggtttcaccatgttggccaggctggtctcaaactcctgacctcaggcgatccgcctgcctcccaaagtgctgagattacaagcgtgagacaccatgcctggtcaatttttatatttttagtagagatagggtttcaccacgttggttaggctggtggcaaactcccgacctcgtgatgtgcccgccttggcctccctaagtgctgggattacaagcatgaaccaccatgcccggccaacactaattttttaaaagctggcacagccttattaatttcagaaaaagctgacttcatagcatgaaattatcagtgatagaagggcattacatactgacaaaggggttaattcaccaagaagacaaggcaatccttactgtgtatgtacataaccacagagtggcaaaatatatgaggggaaaactaatacaactgcaggaagaaatacatgaattcactggtacagctgtatatttcaataacccccagcattaatttagagatccagcaggcagaaatcaggaaggacataattaaattgaacagcaccatcaaaacaactggacttaattgaaatccagaataattcattcagtaacagcagaatatacattcttctcaagttcacatggaatattcaccaagatatctcacattctggtaaataaaatacttcctagcaaatttaaaagactagagaatacaaaacatgttctcagatccagaattgataacagaaagatagcttgaaaacccacaaatatttggatattaaatcctgaacttctaaataatgcatggatgagaaaagtctcaagatattaaaaattattttgaattaaataaaaatagaacttatcaaaacacgtagaatgcagcaaaaggagtgcctggctgaaatgtagacgattgaacacatataccaccaaagaatgatctgtaatcaataatctcagtgtctaacttaaaaaactaataacaggccaggtatggtggctcacgcctgtaatcccagcgctttgggaggctgagtcaggcagatcacctgaggtcaggacttcgagaccagcctggccaacatggtgaaaccccatctctacaaatacaaaattacaaaaatactctctcatgtactctaaaatacaaaaattagccaggcatggtggcacaggcctataatcccagctacttgggaggctgaggcaggagaatcacttgaacccaggaggcagaggttgcagtgagcccagatcgcgccatcacactgcagcctgggtgacagagcgagactctgtctcaaaaaaaatagatagagaaaaaccaacaaaaccaaaaggtggtcttgtgaaaatatcaataattaactgaaaaatgtctcctcaagctagctaacaacaaaaagacaaagattgttaatatgacgaaagggggaaaatgaagaagcacttgacaaaattgaacatctatttatgatagcaaactaggaatagaagggaatttcttcttcttcttttttttttttttttttgagacaggtctcactaaattgcccaggctggagtatattggctattcagaggcgccgtcatagtgctatagcctcaaactggtgggctccagcaatcttcttgccttggccccgcaagcagcaaagactataggtgcatgccactgcatcgggcaagaggaacttcttgagaaagtacatacaagaaacctgcagttaacatcacgcttaatgtgaaaaactagatgttttcccagtaatatgaggaacaaggtaagaaagacccttctcacactctcaccattcatgtatgtatgtatgtatgtatgtatgtatgtatgtatgtatttatttatttatttatttagtgagagagtctcactctgtcacccaggctggagtgcactggcacgatctcggctcactgcaatctccgcctcctgggttcaagcaattctcctgcctcagcctccggagtagctgggattacaggcatgtgccaccacgccccgctaatttttttgtatttttagtagagacggggtttcaccatattgaccaggctggtctggaactcctgaccttgtgatacgcccgtctcagcctcccaaagtgctgggattacaggcatgagccaccatgcctggcctttttttttttttctttgagatggagtttcgctctgttgcccaggctggagtgcactggtgccatctcagctcactgtaaccacctccacctcccgggttcaagagattttcctgcctcagcctcctgagtagctgggattacaggtgcacccaaccatgtccagctaatttgtatatttttagtagagatggggtttcaccatgttggccaggctggtcctgaactcttgacctcaatgatccccccaacccctgcctcggcctcctaaagtgctggattacaggcatgagccaccgtgcctggcccctctcaccatttctattcaatattgtacaacagtgaaactaagaaaaagaaaaagaaataaaagatataccaactgggaaggaagaactaaagctgtctatctgcatatgacatgactgcgtatgtagagaatttcaaaaatctacaacaaagaaaattcctggaaccaataagagcaaggttgaaggacacaagctcaacatataaggccaactcctttcctacacagccacacaaatatagtcaactgatctttgatgaagaaccaaaggcagctgggtgtggtggctcacgcctgtaatcccagcactttgggaggctaagatggggtggatcacttcagcccaggagttcaagaccaatgtgggcaacataacaacactccatctctatttctttaaaaaaaaaaaaattttttttaaataaaagaaaaattaaatgaaaatagatcaaagatgtaactgtaaaatacaataagactcctagaggataatatataaaatctagatgaccttgggtttgatgatgaattataacataaattataagtttgacttcattaaaataaaaaagtcctgctctggggccgggcacggtggctcatgcctgtaatcccaactctttgggaggccgaggtgggcggatgacttgaggtcaggaatttgagaccagtctagccgacatggtgaaaccctgtctctactaaaaatacaaaaattagccaggtgtggtggtgcatgcctgtagtcccagctacttggcaggctgaggtagaataaatcgcttgaacctgagaagctgatgttgcagtgagccgagattacgccactgcactccagcctgactgacagagactccatccccgccgcccccccaaaaaagagtcctgctctgggaaagaccatgttaagaaaatgaaaagacaagctacagacagggagaaattctttgcaaaacacctatctgacaaaggactgatattccaactactaaaagaactattaaaactcagtaacaggaagacaatccaattaaaaatgggcaaaagatatgaacatacacatcaccagagaagatttagagatggtaaagcagcacatcaaaacatgctcaacgtcacacagcattagggaataaaaaaaaactaagataaataaaactgagtaagatattaccacactcactaaatggctaaattttaaaacactaaaaacaccaaatgatggtgaagatggagaacaataagtatcatcattatttgctgctggcaatggaaaatgatactcccactttgaaaggcagacagttacaaaaaaaaaaaaaacacactcttaaattgtaatctagccatcatgctcctaggtatttactaaaaagagttgaaaatttatgttcatgccaaaacctgcacatgaatgcttatagttttattcaaaaccttgcaaaccttagagtgaaccaagatacctctcaatagacaaatggataaaccatctggttcacctacagaatgataaaaagaaatcaggtatcagctgggcgcggtggctcacgcctgtaatcccagcactttgggaggccaaggagggcagaccatgaggtcaggagatcgagactatcctggccaacatggtgaaatcctgtctctactaaaaatacaaaaattagctgagtgtggtggcgcttgcctatcatctcagctactcgggaggctgaggcaggagaatcaggtatcaagccatgaaaagacatggaggctaggtatggtggctctcacctgtagtaccagctactcagggcactgaggcaggaggatcacttgagtctgggagttcaagaccagcatgggtgttatgatgagaccccatctcaatttaaaaaaaaaaaaaagacgtggagaaaccttgacttgaacatatattattaagtgaaagaagccaatctaaatggttatatactgtgtagtttcaaagatgacattcaggaaaaggcaaaattatgacagagtaaaaaggcttttgactgtcaagaatttgggaagagggagggactaatgaataggagaagcacaggggatatttaggtgagggaaagcatcctacatgatgcagctatgatgaatagcagttattatacatttgccaaaacccacagattgtataacagagtcagccctaatgtaaactgtggactctgaggcatcaatattggtacatcacttataacagatgtattaaagtaatagaaaatataaaaaggataaactatgtggaggcagagggatcaagtgggaacactacactttctcatcaatttttctgtaactctgaaatagctctacaaaaataaagtctactagaaaaagaaaaacgatgaggacaggctaatgacaattcacaccatgactggttgatgaatgaaacatacaacctttcactcaattcatgaattttattttagtaagcctttatggtgcttcgtgagccagagactggtaaaggcaatgaaagttccacaggatgccttgttcaaaagcccatcactctctattttgagaagtgaaataagagctttgattagtatcagtagtgtccggaactcttgcacgaatatgagtgtccaggcggagccttggattgtgggattaccctctgtagaggtgtgtattatcttgacttatatggctagccgtgaggtaaaaaaagattcccagagttttgtgggtttttttttttttccctttgagatgaagtctcgctctgttgcccaggctgaaatgcagaggcgcaatctcggctcactgcaacctccgcctcccaggttcaagcgattctcctgcctcagcctcctgagtagctgggattacaggcacgagccaccacacctggctaatttttttgtatttttagtagagacggggtttctccatgttggccaggctggtctcgaactcctgacctcaagtgatccacccgcctcagcctcccaaaatgctgcaattacaggcgtgagccaccacacccagcctaatattcccagagttcttttactacaaaggtgcaactcttagacaatcactcaagagtgtgtaaacatgtgcagatgggatttattgttggccactgctaagatgactaactgatgaactgccccttgaatctagtcctttattaggtccatttcaattaagggataaaaagcagcagctccaacatgtacaaatgtggccatgtcagccatcaagtctacacactcgccactgctgttcactcagtagcaaaggatctaggagaaggtagacctcctccagcaccatgacatctggcaaggaagaaagaaaagaagtcaccctcccaccccaactcctgcagagaggatatgctgaaggctaacatttgactctgtaattttgaaaggaggtctgtgtaggttgctgtttctaggacccatggcaaaatgagcagttgagtagagtcacatgcccagggcccaggagagcctcaatgttcaggataacctagtacaaggtgatcattgcagctctaatggcatatagtgtggggccaagggctgtttcttgcatcagagccctatggacaacttatggtcatcatggataattacaagaggcatgagaggaggtttctaaagccactatagtggccaggaatggtggctcatgcctgtaatcccagcactttgggaggccatggcaggcagatcactggaggtcaggagtttgagaccagcctggccaatacggtaaaaccccgtctctactaaaaatacaaaaattaactgggtgtggtggtgcacacctgtaatcccagctactctggaggctgaggtaggagaattgcttgaaccagggaggcagaggttgcagtgagccgagattttgctactgcactccaacctgggagacagagcaagactccatctcaaaaaaaaaaaaagaaaagaaaagaaaaaaagagcatctatagtgctctggaggcactaacaggagtgcctgccatatggcaacttaaacagtgtctagagcctctgtggtagcgatatccgggcaatgatgaccaatttgcaagtcacagcataaatgggcttaagtaaactttataaaggactgtgttacctcctgaacatcaaaaaagcccaaatgatgttgtgggtgccaacaggaacaacagcagtaggcagaggttgcagtgagctgagatcacaccactgcacttctgcctgggcgacagagtgagagtctgtctcagcactcccacctgggcaacagaggaagaagactccatcaatccatccatcaatcaatcagtgtaccttgcttacatttagtgggatctccagatatagctgattcctaggattgattaatcccatgaatgattgtcagttagtgcattacagagatgttaaaattaattcagaactaggctgggcctggtggcttattcctgtaatcccagcaccttgggaggccaaggcaggaggattgctagagcccaggagtttgaaaccagaaatatatatatatgatttaaaaaataataaaattcagaactaatgtcggagaggcctgaaagccaagcacatgcagtgtccttttctctctctttttttttttgagaccgagtttcgctcttgttgtccctgctggagtgcaagggtgtgatctcggctcaccacaacctccgcctcccgggttcaagaaattctcctgctccctagtagctgggattacagccatgcaccaccatgcccagttaattttgtatttttagtagagaagggggtttctccatgttggtcagctcccgacccgcctgtcttagcctcccaaagtgtttggataacaggtgtgggccaccatgtccagccttttttttagttgcataattcttttactatattttggagttgcaattaggtcaaaacctagaaaaatgcttcatttttttttcttttgtgcccttccttctttaatctttctctgttttgtttctgtggtcacttgatatgcttccggttatcttcctaccttaatatttattaatatatttttttcctccagaaaacctcaaattgtaggttatgggcctcacccatggaactggtggcattaaaaggtttcagggctgggtgtggcgactcacacctgcaatcccagcactttgggaggctgaggcaggtggatcacctgaggtcaggagtttgagaccagcctggccaacctggcgaaaccccatctctactaaaaatacaaaaatcagccgagtgtgttggcaggtgactgtaatcccagttacgcaggaggctgaggcagggagaattgcttgaacctgggaggcagaggttgcagtgagccaagatcatgccactgcactccagcctgagcaaaagagcaagactctgtcaaaagaaaaaaagaaaaagaaaaaaaggtgatttgggccagcgcagcagctcacacctgtaatcccagcacttcagaaggctgaggcaggcagatcacttgaggccaggagttcgagaacagcctggtcaataagatgcaatcccatctctactaaaaatacaaaaatgggccgggtgtggtggcacacgcctgtaataccagctactcaggaggctgaggcataagagttgcttcaacctgggaggcaggggttgcagtgaactgagatggtgtcactgcactccagtctgggcgacagagaaagactccgtctcaaaaaaaaaaaaaaaagtgatttgatcaaggaatccaagggaaagaaacgcaaatgttttaatctgtttagataaggaattgcttctccaccgttaaaatggaaaactcacaatcgaaaggtaaatacattcacaagggccaggcatggtcacgcctataataccaacattttgggaggccaaggcaagaggatcccttaaagccaggcgttcaagactagcatgagcaacacagcaagaccctgtatctacaaaataaaaatttgaaattagccagtagtggcagatgcctttagtcccagctactcaggaggctgaggcgggaggatcgcttgagatgcagtgaggtttgatggcgccaccgcacttcagcctgggcgacactgcgagaccgtgtcaaaaacaaacaaattcccaaacttgagagcggtagcccagacagtgggtcagtgcctggtgatgacagcaggggcatctgagcagccacaggaacgaactctgggagctccacacgccctcctctcccctagctgcaaaaaaaatgttccctcctccaggcttcaattctcacaggtggattcaccttaatgttctgacccaaatggattctcaaacacacgagaatccgtcatgactttcccgtggcccctgcacaatcttcggagacgcggggctgggggcgcccagctgcccggaaagggctccggggccggggccgcaatcgcagggacgggacagaacgcctgaggtcccagctgccggcccagccccacgctgctgggagaccctcgggtcagctgcgccagggggactcgggtcttcccatagccggttccgacaagtcccctcctcaggtctcgggactcccggccccgcacactcaccatttctcggcttacggaggctccaggagtcctccctacggatccctcactacctgcaggtcccagtgagacaaagcatacgcagagccacagacagtccgaggctgggacgcaatcctagcgaaccgctagaataaggatgttcacacgcgcattcagagctagggtgcaagcgccttttcaacaccgatgctgactggacagtttgtgtgcccccgccccctgacccctgagtgacagccatgcaggagggcacgtggttgagccgagctagcttcccagagtgggttttcccggcggggatatttgcatgtaagaggaatttgttctttgcccgaggtccatttttaagtggcctattcagtagtgttaagtgtagttacattgtgaaaccaatctctagaactgatttaatcttgcaaatttgaaactctttattgattgaataacatcccatttaccgctcaccctcagcccctgacacctactattcgactttttgattgtgtgaatttcactgtgggtacctcatataggtggaattattctgtatttgtccttttccgactgacttatttcacttagcataatgtcctcaatcttcctgatgttgtagcatgtgtcagaatttacttccttttaagacatttaaaggccaggcacgttggctcaagcctgtaatctcagcacttcgggaggatcccttgaggccaggattttcacaccagcctgggtaacactgtaagaacccgcctctacaaaattaaaaattaaaaattaagaaatatagattccggccgggtgcggaggctctcgcttgtaatcccagcactttgggaggccgaggcgggcggatcacgaggtcaagtgatcgagaccatcctggccaacatggtcaaaccctgtctctactaaaaatacaaaaattagctgggcgtggtggcacgcgcctgtaatcccagctactcaggaggctgaggcaggagaatcacttgaacctgggaggcggaggttgcagtgagccaagatcgcgccactgcactccagcctggtggcagagcgagactctgtctcaaaaaaaacaacaattaaaaaaaatagctattgcaacagaagctactcaggattttaagaaaaagtgtggtttagacacttagaaatgtctttgggaaaaaaaattgttaagtgcactgtaaaagcatcacatgatctagcctcataataattctcccctttttttttggaggcagagtttctctcttgttgcccaggctggagtgcagtggcgtgatctccgctcaccgcaacctccgcctcccgggttcaagcgattctcccgcctcagcctcccgagtagctggaattacaggcatgagccaccacgcccggctaattttgtatttttagtagacacggggtttctccatgttggtcaggctggtctcgaactcccaaccttaggttgggatctgcccgcctcggcctcccaaagtgctgggattacaggcctgaaccaccatgcccgtcaataattctccctttttaaaacccaggattctgccgggcgcggtggctcatgcctgtaatcccagcactttgggaggctgaggcaggcggatcatgaggtcaggagttcgagaccagcctggccaacacagtgaaaccccatctctactaaaaatacaaaaattagctaggcatggtggcgcgcacctgtagtcccagctactagggaggctgaggcaggaaaatagcttgaacctgggaggcagaggttgcggtgagccgagactgcatcactgcactccagcctgggcaacagagcgagactccatctcaaaaaaaaaaaaaaattagctgggtgtggtggcggggtgcctgtgatcccagctattctggaggctgaggcaggagaatcgcttgaacctgggcagtgacccaagatcacgccactgcactccagcctgggcaacagagcaagactctgtctcaaaaaaaaaaaaaaaaaaaaaaagaaagaaagaaaagaaaaaaaaagagacataaagaaagttataaaaataaataagtatttttggttaaaaaaagcataaagaaaagatattttatataaaaaaggatcttgtatgatagattcttgtcctaaagaaaaatgactggttgtttaaaaagagggatgtttaggacaagtcagaaagtcaaggcatatcatagagtgtaagtcatgaaagaatttatgaaagggaacttatggaagaaatgttgtagaatttaaaggtgtttaggcctcctgaatgcttcataaaatgccattatgactcttaactgtacaactgcctgctttacagctagggaaggcctgggacacaagaagttagatgctagaatgagtcagaccttatctgcacttctgtctaggtcctaggctccccacctggtccataattaaaatcacttaccaggtttttcaccaaaagtaaaagttgctaagaatcaatattgtaacatgtaattgagactactggaaaaaacagttttacatgcaaggtgtgtaaggaaagtagagtatacttttggtaaaaagattataagaaggcatgggaatgtggattttttttgcctaaataaaaggttaatggattaaattagataaaataaagctgaaagtttaagcaagttgtggaaggttgattgtaaaagaaattctgtgtgtaaacatattggctaaagttaaagggggtattatccagtttttctgtaaattgaatattaaaataaaagcacaacggctttcttttagaacactaacctgctctttaacaaaaattgtaaagggtaataaaaaatctataaaaattgccaaacattggcgtaaatatgtctataaaattgggtaaatatgtctataaggttttattaagaattgggtttaggccaggcgccgtggctcacgcctgtaatcccagcactttgggaggccgaggcgggcagatcacgaggttaggagatcgagaccatcctggctaacatggtgaaaccccgtctctactaaaaaaaaaacacaaaaaattagccaggcatggtggcgggcacctgtagtcccagctactcgggaggctgaggcaggagaatggtgtgaacccaggaggtggaagttgcagtgagccgagatgtgccactgcactccagcctgagcgaaagagcgagactctgtctcaaaaaaaaaaagaaaagaaaagaattgggtttaacagtaatagtatactaatgtaaatgtgaaatttggcttatttggtacaaaaatcatagaggaagcaaagtcaaatataaaatggagtatggctttctttggactatatctgtatatatatgttattggtatgtgttccaaaatgatggaaaactcttgtaattctgatatatcagtgtatgttatcagtaataattataattattatgttaaattattgtgtgccacagagtaacagatttccttgtcaattgtgtctttagctatggctaccctaaaactttgtcatccataaataattgttgtcttgtcttggtcctctttagaaggtggttttataatcagctataaagctctaacaggtgctcttgaatgcaagttttagataactttggagattgtgacatcagaatagagaaaaaatgttcaggactcttgtcctagcactttgggaagccaaggtgggtggatcacttaagcccaggagttccagaccagcctggccaacatgacacaacctgtctctccaaaaaatacaaaaattagccaggtgtggtggtgcacgcctgtagccccagctacttgggaggctgaggtgggaggatcctttgagcctggaaggcagagactgcagtgagctgaggctcacagctttccagtcagggagacagggtaagaccctgtctcaaaaaaaaaagaaaaaaaaaaggccaggtgcgttggcttacgcctgtaatcccagcactttcggaggccaaggcgggtagatcacgaggtcaggagatcgagaccatcctggctaacacggtgaaactccgtctctactaaaaatacaaaaaattagccaggcgtggtggcgggcacctgtagtcccagctactcgggaggctgaggcaggagaatggtgtgaacccgggaggcgaaggttgcaatgagccgatattgcgccattgcactctagcctgggtgacagagcaagactccgtctgaaaaaaaaaaaacaaaaacaaagaattggggtctcactctgtcacccaggctagactagagtggtacaatcatagctcactgcagccaaaactcccaggctccagcaatcctcctccctcagccatcaagcagctgggactacaggtgtatgccacaaacctggctaatttttttttataagatatgaggttgcactatattgcccaggctggtcttgaactccaggactcagatgatcatgccactgtgctcggcccaattttattattttttgtatgtctatccaactgtcacaacaccaatttatgaaaataatattctaggccaggtgcggtggcataggcctgtaatcccagcactttgggaggccaaggcgggcggatcacgaggtcaggagatcgagaccatcctggctaacatggtgaaaccctgtctctactaaaaatacaaaaaaaattagccgggcttggtggcaggctcctgtagtcccagctactcaggaggctgaggcaggagaatggcgtgaacccgggaggcggagcttgcagtgagccgagatcgcaccactgcactccagcctgggcgagagagcaagactctgactcaacaaaaaaaaaagaaaaaagtaaaaaaagaaaataatattatttcccgattcctggcaccgtttttgaaactcagttcactatatacacacacacacacacacacacacacacacacacacacacacacacacatatatgggcctatttctggaatttcaatttcatgccattgatctctatgtctgaattgcctcatgtatttgatatgaaaattttgctgctactggagactgggtgacataaattaaattgtatatcagaaaacctttggctggcgcggtagctcccgcctgtaatcccagcactgcgggaggccgaggcaggaggattacctgaggtcaggaacttgagaccagcctggccaacagggtgaaaccccatctctaccaaaaaaataaaaataattagttgggcatggtggcaggcacctgtagtcccaactatgtaggaagctgaggcaggagaatcacttaaacccaggagacaaaggttgcagcgagccgagatgatgccactggactccaacctgggcaatagagcaagactctgtctcaaaaaaagaaaaccactgaggtcttcctagagggtaatggtcatctacacagtgcagcccatcatgtatatttctttttttttttttttgtcgagacaaggtttcactatggttatgcaggctagagtacagtggtgtgatctcggcttactgcagccttgacctcccaggctcagatgattctctcacctcagcctcccgagaagctgggcctacaggtgcgcaccaccacgccgggctagttttttgtatttttagtagaaacaaggtttcgccatgttggccaggctggtctcaaactcctgggctcatgcaatccacctgcctcagcctcccagagtgctgggattacaggtgtgagccaccacacctggccccatcatgggtttttcttatgtgcagagtacttattcaaatccacagtgatttcccagttgacacacagacaagaactatggattcttagagaatatccaagttataattgaatcaaactgcagagagagggtatcattttgagtaccaccccccagtttggtggaaaagaaagttgtgatattgtgaaatatataatttgggttttgtccagggttcctggctcacagttgctaaaaaccttgtaatttcctaagcgactagagcaattggagtatcttttgttaaaatatttgggctgcctgtaatcccaccatgttgggaggctgaggcaggcaggatgcttgagcccaggagttcaagaccagcctgggcaacacagtgagatcctatctctacaaaaaatacaaaaattggccaggcataggggtgtgtgcctatagtctcagctacttgagaggttgaggtgggagggtcacctgagctcagggaagtcaaggctgcagtgagctgtgatgacaccactgcactccagcctaggtgacagagtaagactctgtctcaaaaaacaaacaacaaaaaaaaggctgggcgctggggctcacatctgtaatcccagtactttgggaggccaaggtaggtggatgcttgagctcaggtgtttgagaccagtctgggcaacatggcgaaaacccatctctactaaaaatagaaaaaaatagccagatgtggtggcgtgcacctgtagtcccagctactcaggaggctgtggtgggatcattgcttgaacccgggggtggaggctgcattgagccaagattgtgccactgtcactgggtgacagagtgaaggagaccctatctcaaaaaaaaaaaaaaatggccttttgtattcagttcttaaaatagctctagaagagttccagagtgacaggtggaagaaatgtctttagttattcataaccatcccctttccaccacagctaagtttatgttaatggggtgatttttggaaagctcctacaaaccacaggatgtgaggctagttgccagggaaccaaccatgtgactggagctttgaaactttcagctctgtccccacctccagggagggaagagaaaactgaaggttgagttgatcacccatagtgaatgatgtgattaatcatgtcaccataataaagccaccataaaaacccaaaaacacggctcagagagccttctggttggtaaataagaacataaccatatgcctggaggtatctcttcatctggctgttcattcgtatcatttaaaatatcctttgtagggccaggtgtggtggctcacgcctgtaatcccagcactttgggaggctgaggcaggtggatcacttgaggtcaggagttcaagaccagcttgaccaacatgatgaaaccccatctctacttaaaatacaaaaattaggccaggtgcagtggctcacacctataatcccagcactttgggaggacaaggtgggcggatcatgaggtcaggagttcgagaccagcctggccagcatggtgaaaccctgcctctactaaaaacatagacacacagaaaaaaaattagctgggcatggtggcatgggcctgtaatccagctacttgagagactgaggtaggagaatcacttgaccctggtaggcagaggctgcagtgagccaagattgtgccactgcactccagcctgggcaaaagagtgagactctatctcaaaaaaaaaaaaattagccaggcgtggtggtgggcgcctgtaatcccagctacttgggaagctgaggcaggagaattgcttgaacctgggaggcagaggttgcagtgagctgagatcgcgccattgcactccagcctgggcgacaagagcaaaactccgtctcaaaaaaaaaataataataataataaataaaataaaatatcctttgtaggctgggtgcagtggttcacacctgtaatgccagcactttgggaggccaaggcagatggatcacttgaggtcaggagttcgagaccagcctggccaacatggtgaaaccccttctctactaaaaatacaaaaatagctgggcgtggtggaggatgcctgtcattccagctactcgggaggctgaaacacgagaatcatttgaaccctggagatggaggttgcagtgagccaagatcgtgctgctacactccagcctggcaacagagtgagaccctgtctcaaaataaagagtaaacaaataaataaataataaaatatcctttgtaagactaggcacagtgactcactcctataatctcagtgctttgagaggagcgaggtgggaggatctcttgagacctggaggttgagactagcctggacaacagagcgagaccctaactttacaaaaaataaataattagttgagtgtggtggcacatgcctatattcctagctacttgcggggctgatgagggaggatcgcttgatcccaagagttgaaggctgcaatgagctatgatcctgccactgcactccagcctgggagacagagtgaaaccctgctctattaaaaaaaaaaaaaacactttgtaataaatgggtgaatgtaagtaaagtgtttctgtgagttctgtaggctgctacagcaaattaatcaaacccaaagagtgggtcatgaaaaccctgatttacagcttgttggtcagaagcataggtcacatcctgggacttacaactgacatttgcagtgaggggcattcttgtgagccgttagcttttggtattggactccgtctccaggtagatactgtcacaattaaattgaattatatagcacacccagctggtgtctgcttgagaagtggttattggtggaccagaagtgaagtattctgttaaatattttgttaatggttttcctatccctttaagaaaagtgtatttgagaccctcgaataggatttttttttaatttaatttttttttttgagacagagttttgctcttgttgcccaggctggcgtgcaatgatcttggctcaccgcaacctccacctcccgggttcaagcaattatcctgcctcagcctcccaagtagctgggattacaggcatgtgccaccacgtcccgctaattttgtatttttagtagaaacagggtttctccatgttggtcaggctggtctcaaactcccgacctcaggtgatccacccacctcggcctcccaaagtgcagggattacaggcatgagccaccgcgcctggcctaaaataggattttttttttttttcattttagagacagagactcactctattgcccaagctggagtgcagtggcacaatcataggtcattgtagcctccaactcttggactcaagggatctctgctatgggactacaggcacatgccaccaccctgggtaattctttttttttttttttttttgagacagggtctctatctgttgcccaggctagagtgcagtggcatgatctcagctcactgcaacctctgcctcctgagttcaagcaattcttctgcctcagcctgctgagtagctgggactacaggtgtgcaccaccatgccccgctaattttttgtattttagtagagatgcggtttcgccatgttggccaggctggtcttgaactcctgacctcaagtgatttacccacctcagcctcccaaagtgctaggattacaggtgtgagccactgcacctggccaattttttttatttttatagagacaggatttcactctgttgcccaggctttgatgtccttttataaaaggaatcactggaagatttttattttaatgatcagcaaaggcctaaaagtccatgaccattcacaagtatcatttccatatggtagatttccagcacatgttaggaaagaaaaaaaatgaacagctttgtgttttactaaagaacaaataaaatcccatttttattcaatatttcaataatttatgtttgcacatcactgtggtgactaatgtgatttcataatcattagtatttcatttgattagccccacccaatcatacctcccatcttgcaaatgaaaaaagttaagtatggagagcacaaagtcttgtctaaactcatatggctcataagtaataatgaaattggccaggtgtggtagctcacgcctaccatcccaacactgggaggctgatgtgggaggatcacttgagtccaggagttcaagatcagcctgggcaacatagcaggaccctgtctctaaaatttaaaaaatttaaatttttttttttttttgaggtggagtctcactctgtcacccaggctagagtgcagtggcatgatctcggctcactgcaacctccaccttctgggttcaagcaattctcctgcctcagcctcccaaatagctgggattacagatgtgcacaaccacacctggctaaaaaaagaatttttttaaaattagccaagcgtggtggcgcacacctagtcctagttccagctactagtcccagctactagggagcctgtgaagttgagtctacagtgagctgtgatcttgccactgcactccagcctgggtgacagaacataatagtaatagtaatacaatataataacagtaataataatggaacttctcagtattaaagtccaaatgtgtgccaccacatatactgagcactgtcaaaaactgaaaactcaggccaggcatagtgactcacacctgtaatccctgcactttgggaggttgaggcaggagaattgcttgaagccaggagcttgagaccagcctgggcaacacagcaagatccctgtctcaaaaaaaaaaaaaaggaacaaacaagaacagcatagcatctgcagacagagaagcagcagcaaatcagtggaggccaggattgatagcttccccatttcgggttttggtagacaggaaggacggtgacccagacactgaaaaataccagcatgctgaacttaaggattggcttattgaaaatgtcaggcaagttcctggccagaaaagccacattgaagctcccatgagccaaggaacccaggattcacagaacagtcaataaccaaatcgtggttttatgtgaagatgacatattcaggctcagattatgtatccacatgcatgaaggctgtagtcattccccatgaaattcctcccacttcagcatcccaaagtgttgggattacagagtcacttagatcagggaactgatagcaatgacaaaattaggtacccccgacactaacccgtgccttatccgtctcttgcatgtttaccttgaaggtcagaactgcagtgatcgttttgtccaaactatgcaaacaagtaaacatgactccaaatttgtggtttttgtgtttttttgagacagggtctcgctctgttgcccaggctagagtgcagtggcaccatcacaggtcaccgcagcctcaggttgaagccatcctcccgtctcagcctcccgaggacctgggactatgccaccatgcccagctaattttttatctttatttatttatgtatttatttatttatttatttatttatttttgagacagagtttcactctgttgcccaggctggagtacagtggcgcgatctcagctcactgcaacctcctcctcccagattcaagtgattctcatgcctcagccacccaagtagctgagattacaggtgtgcctcccaccatgcccagctaacttaaaaaatatttttaatagagatgaggtttcagcatgttggccaggttggaaaccaactcctggcctcaagtgatccacccaccttgcctcccaaagtgctgagattacaggcatgagctactacacccagccattttttttattttttgtagagacagagtctcactacattgcccacactggtctcaaactcctgaactcaagcaatcctcctacctcagtctcccaaagtgccaggattacaggcatgagccactgcacccagcccaaatgtgatattccaaaggatgcaggtggctgtgttgggatggccaatgaaggtaagggacaatggaagtacagggtgagggcaatgaacaggacatacctgagagcctggttattggccttgactatgggagtgccttcacaaagacccgaaagacccccccacaaagaggtcatagaaggacagacccaaatggtcattataaacaaggaaggtagccacgctgacaggtagcgatctcacttacagtttgagtcttgatgctttgtccatggtgttcactgttctgcatctaattagaaacaagaggatgcattttgtgagtttcagcaatttagaactaaacatgacctttgacagccttggaagcattgttccccctgcatctacctgtacacacagagctaccagaagggtggatcatgggagttttcaagattacactgtctcctctataatgggaaaaatgaaatatgtttctactttaaaaaaaaaatttagagacagtctctctctctcccaggctggaatgcagtggcacaatcttggctcactgtaacctcaaactcttagccttgagatccttctgcctcagcctccgaaggagctaggactacaggtgaacaccatacccagctaatttttaaaaattttttgagaaatggggtctcgctatgttgcccaggctggttttgggctcttggtctttccaagttctgtagggacactttagaaaacttatttgagataaatttccttccactttacagcaacacggatggaactggaggccattatcctaagtgcgatgatgcaaaaacagaaagtcaaaaactgcatcttcttacatataagtgggagctaaacaatgggtaaacatggacatacagaatggaataatagacactggagatgccaataggttggacagagaggggggatgagggatgaaatattacctattgggtacaatatacactctttgggtgatgggtgcactaaaagccagacttcgccactatgaaatatatccacgtaacacaagtgcatttgtaaccataaatctacaaaaataaaaataaaaatgaaaagcaataaaaacatgcttaaactaaaaacaaacaaacaaaaaaacaacgaaaacaaaccatttccttccagagtaaaacgcagtttactgagcacgtctcatagatcgtgattggtctgaagagtccctgtgcccaggttagggttgcaatttaccacccgagccaagtgctcgggtgtcctacggattgttttttctttctttcctttttttttttttcttgggatgggttctggccatgttgcccagactgaactcaaactcctggagtcaagcgatccacccgcctcagcccacccaccccccgacctcccccaccgcccccaccacgcagtagctgggactacgggtgtgcgccaccaagccctgccttggggttccttttctaaagtgccaaatgtgtggaggtggggaaaagaaaggtggacgcctcaacgctgttatggtcaaagattaaaatgcaaccacactttttattacacatgatggggtaaccgtctgtttataaacaagggtcactattccacgagaggccttacaacattatgccaagcccctggtacctggaggacatcagaccctcctgttcctgtgcggccttgactagacgaccacttgctctggacttgctcctcgaggggtcgctccatctggaaactgagactggaattcctgcgcatccctgtccccgcatccagaaacactgcaggaagacttccgtgtccgacccgagatccggaacaatttctgcttcaacacaattgtccacggagggcaccagttccgtcccaccggcggaagcgagatctgcctagctactagacctgctgcctagctgtcattcggacaaaaaggggcggggctgtataattgtccaatcaggggcggcgccggaaaggagggtacggctacgctgcgcaaatgcgtgctacgtcactgtgcgatcgggttgtgcttagcttggggtctcctggccccttgacgcgtcaggttgctgtacccctgcatcggatgcgctgtaccctgcgctggctccgtgaaccttagggacaacaccgggacacccgcgaggccggaaaatggtgagtgtgcagggccggactagttggaaccggccgtgatcgcgggacccgggcctccccacggtcacctccggccgcagtgtggggctgggctggcagctggaactccaagcgtcctgtcccgtccctgcgcggcgactgcggtcccagccccggagccctctctggacaactccgcgcccgcagccccgcgtctttcccagatcgtgcagggaccacgggagggtcctggggagaatcccgccttgtgtgtttggtttgtgtgggaggagctacagtctggggttcccagtcccttctttcttcccaaaggctgtttccccctgagtcttccaaagatgttggaagcagagtctcaaatccactaccctgtccccccagcctagctcctcccacggcgggccattaatccctagatttccggatccctccccgaattcccaaacgcctacttccgctcgccagtggaaaacatcgtcaccaactctttgtcctgtgtggtgcatttcaaacacacgcagtattttaataatcttttttccaatagatgcctcttttaaacgatttatttcttgtttgtggatattttacatcagagaaaaatcagaaaaattattcacttggaactaatctgcataaaatgctgtggccctcatcctggtacctttccagggcacagacatcctatgggaactcctttgcgttgaggttcctttttgtaaactttcctgggtaatctatcttttcagcacagtttcagattggcactgtcccgccttgggtttatgaccttgaaaagatttattcactcgaatgtcatttttccaataaatataaaatatatgttatcagaagaacttgagagacagtacaaaatatttccaaagggcaaaaaagaaatgaatctcagaaaacaaaaaacatcccaatattacatttgttaaaaattctttgttctttccctgagcacatggaatatgtttctcaggtctgttcttttagtttgatgtttcagatggtattccaggacttaaacttgcaacatctagaagcattcagatagaagtaatacttttgtaaactatttattgccatggaaataattaactgacattattattttcttttttttttttttaacagatggggtctggctgtgttgctcaggctgatcttgaactcctgggctcaagcgatcctccaccctcagcatcccaaagtgctaggattccaggcatgagctactattaccggcccaacattctcattttctgaaagcaatagtgggttttcttgttaaatggcttaaaattttcttgcttccttcctttatttatttatttatttatttatttattatttatttacttttttttttgagacggagtctagctttctcgccaggctggagtgcagtgacacgatctcagctcactgcaacctctgcctctcgggttcaagcgattctcctgcctcaacctcccaagtagctgggattacaggcacaagctaccacgcccagctaatttttgtattttttttttttttttttagtagagagtgtttcactatgtttcccaggatggtctcaatctcctgatctcctgacctcatgatcctcccgccttggcctcccaaaatgctgggattacaggcatgagccaccacgccaggccttttgcttcctttatacgtaaacactgtgtttaagtaattctgctggatttttttttttttttttttttttaaagaccaagtcttgctcttttgcccaggctggagtgcagtggcacaattttggcttactgcaacctccgcacttggaagctgaggagccacaggcagatgctgttaggggaagaggggaggatgtctgaggttttaattgtggtttccttgggtgtgtttttagacattacatttgagtttcacatctgtaaggtaggtacactgagtgtaattggtgcatattgacagccattctcctgccttagcctcccaagtacctgggattacaggcacacaccactatgcccggctaatttttttgtattttgagtagaggcggggtttcaccatgttggccagtccggtctcgaactccggaccgcaggtgatccacccgcctcagcctcccaaagtgctgggattataggtgtgagccatcgtgccaggccttctgctggatgtttaaggaacaatccttaagaatttaagggcccggcacggtggctcatgcctgtaatcccagcactttgggaggccaaggagggcggatcacgaggtcaggagctcgagaccatcctggctaacattgtgaaaccccgtctctactaaaaatacaaaaaattagctgggcgtggaggcgggcgcctgtagtcccagctactctggaggctgaggcaggagaatggcgtggacctgggaggcggagcttgcagtgagccgagatcgcgccactgcactccagcgtgggtgacagggtgagactccatctcaaaacaaaaaaaaaatttaattaaattgtctcatttaaaattactagtagtgttccagagccttgtgactggggagcagaggcctgagataagtgattccaagctaagtccacctttgagcctgcaaagaaagatcattgaaggcccaattggttcttcctggggagcctcccctacaggtctgccagctactcatatgcccaccatggaaggatcctcttgtactgaaagaaactgcagagcacttggaagctgaggatgcacaggcagatgctgttaggggaagaggggaggatgtctgaggttttaattgtggtttccttgggtgtgtttttagacattacgttttgagtttcacttccgtaatataggtgtactgggtgtaattggtgcatattgacagtgtctgtgaaggtcaggacttatgtttcctagagacagggttaatgaattggggagctcatttgcatcagaacctcaatctcaatctggttgagagtttcctcacttgggaaaacggaaacctagggaagctaatgtttctttgctgccataggagagaaggaggtgtggagctcccatagttccttgctgatcaggtgcttctatcctccattaccaggtactgacccactctaggggttacatttttctttatttttattttttttgagaccgagtctcactctgttgcccaggctggagtgcagtggcacgatctcggctcactgcaacctccgcctcctgggttcaagccattctcctgcctcagcctccagagtagctaggattacaggtgtgtgccaccaggcccggccaatttattttgtatttttagtagagacggggtttcaccgtgttgaccaggctggtctcaaattcctgacctcaggtgatctgcctgccttggcctcacaaagtgctgagattacaggtgtgagccaccacgccaggccggggttacgtttttcaagctgggagagtctgggtccaagctggggaatatgtttaactttttttttttttttttggaaacggagttttgctcttgttgcccaggctggagtgcaatggcacaatctcggctcaccgcaacctccgcttcccaggttcaagcgattcttctgcctcagcctcccaggtagctgggattacaggcgtgcgccaccatgcccagctaattttgtatttttagtagagatggggtttctccatgtttgtcagtctggtcttgagctccccacctaggtgatctgcccaccttggcctcccagagggctgggattacaggtgtgagccactgcgtccggcctttttttttttttttttttttttttttttttttttgatacagcgtctcactctgttgcccaagctggtctggaactcctggcctcaggccgtcctcccaccttagtctcctatgttcaactttttttttttttttttttttttttgagacagggtcccactccgtcgcccaggctggagtgcagtgatgtgatcattgctcactgcagcctccacctcctgggctcaagtgatcctcctgcctcctctgagtagctgggactgcatgcatgcaccacaatgcccatctaattttcgtattttctgtagagatggggtttcgccatattgcccaggctggtctggaactcctgggctcgagcacttctcccgccctggcctcccacagcgcatggcctcccacaatttcttgacatccaaagatacttttgctgtcttaaggttttatattttccagaatgtaatacacgtggagttattcaggatatagccttcacagattggcttccttcactgagcaatgtacttttaaggtccttctgtgtcttcatggcttgatacctgatttctcttatcgttgaacaatatttcatcataagattgtaccggccgggcacgatggctcatgcctgtaatcccagctctttgggaggccgaggcgggcggatcacaaggtcaggagtttgagaccagcctggccaacatgacaaaaccccgtctctactaaaaatacaaaaattagctgggtgtggtggcgcacacctgtaatctcagctacctgggaggctgaggcaggagaattgcttgaacctggaaggtggaggttgcagtgagccgagatagtgccattgcactccagcctgggcaacaagagcaagactccgtctcaaaaaaaaaaaaaaaaaaaagattgtaccacagattgtttatccataaacctgttgcatgatgtcttggttaagtcttaaatttggcagttatgaagaaacctcctgtaaatattcatgggcaggtttttgtatgaacagtatttttcaactcatgtgagtaaatagcaaggaatgtgattgcatggtccactggtaagaggacgttttgttttgttagaaactgcctatcttccaaagtagacataccattttccatttccattggcaaggaatgagaattcttgttgtctacatctttgctatccattgctgttctcagcattttgaactttgtacgttctaataagtgtaaagtgatatctcttcagttttatttgcagctccttagtgacatataattgagcatctcttcatatgtgtatttgccatctgtatatctttcattggtgaggggtgtgttcaggtcttttgctcatttttcactggttcatttgtcttatttttgttgagatttaagagttcgaattggaggcaggcatggtggtacacgcttgtcatcccagctactccagaggctaaagtgggaggattgcctgcacccaggattataagcccagcatgggcaacataatggatcctatctcaaaaaaacaaaaaggacgctaggcatggtagctcatgtggggccacccaggctgctggggagcagagctgagaagtggtgctggggctggagctgccaagggatcggagaaaaaaaattagcccaatgtgggtggcacacccctgtagtcccagctatttgggaggctgaggcatgagaatcgcttgagcctaggaggcagaggttgcagtgagccgagattgcaccactgcactccaccctgggcaacagagcaagactgtctcaaaaaaaaagaaaaacaaaaagaattctttggatattttagatactagtccttaatcagataagtgcttttgtgaagatttgcaaaaatctgtctgtgccttttatttttattcttttaacactttctttcacagagtaggagtttttcattttaatgaagtgaaacttattttttcctttcatagattgtgcttttagtggtttatctaaaaattcatcaccaaagccaagtggatagttttgcatgttacatttacatctatgatcgatttgggcttaatttttgtgaaaggtgtaagatccatgtataaattttttgtgggtgtatgagagtttaatagtataaatttcacttaggtactatttttgttgcattccacaaattttgataagttctattttcatttaattcacatttaatttttcttttttcttcttttttttttttttttgagacggagtcttgctgtgtcactcaggctggagtgcagtggtgcagtcttggctcactgcatcctccgcctcccgggttcaagcgattctcctgcctcaacctctcaagtagctgggattacaggcacgtgccaccatgcctgtctaatttttttatttttagtagagatggggtttcaccatgttggccaggctggtctcgaactcctgacctcgtgatccgcccaccttggccccccagagtgctgggattacaggcatgagtcactgcgcccggcccaaatttaatttttcttgagatttttttgattcatgtttagaactgtgttgggttttatttccaaatatttgatggttttctaactattcttctgttactgatttctagattaataccatggtggtctgagagcatattttatataatgtatattctttgaaaattgttaaggtgtgtttttgtccacaacatggtttatcttggtgaatgttccacatgaacttgagaagaatgtgtgttgttctgttggatgaagcattcatggattttaattaaacccagttgttgcctttcaactaaactttgtcctttctgattttctacctgctggaactcttttttttttttttttttttttttggagacagggtattaccctgtcaccaggctggaatgcagtggcatgatctcagcctactacaaccaccacctcagccttctgagtagctggaactacaggtgcgtgccacatacagggctaaattttgctttttttttttttttttttttgagacagagtttcgtccttgtcgcccaggctggagtgcagaggcaagaactcagctcactgcaacctccatccactgggttcaagcgattctcctgcctcagcttcacaggtagctgggattacaggtgcacaccatcatgcccggctaatttttgtatttttagtagagatggagtttcaccatgttggctaggctggtctccaactcctgacatcaggtgatccacccaccttggctttgcaaggtgctgggattacaggcgtgagccaccacgtccaccaaccatctattctttttcacaagtattgtatttttaaatttttgcctcctttgaacatttaatgagtattaatggaattacacttaaagggttttttggagcctaggcaacatagtgagacccatctttacaaaaaatgaaaaaattagccaggcatggtgatgcacacctgtagtcccagctactcaggagtctgaggcgggaagattgcttgagcccgggaagtcgaggctgctgtgagccgtgactgcaccactgtactctagcctgggcaacaatgagaccccgtctcaaaaataaaataaaggccgagtgtggtggctcgcgcctgaggctaggagttcaagaccagcctggccaacatggtgaaaccctgtctctactaaaatacaaaaaattagctgggtatggtggtgcgtgcctgtaatcccagctactcaggaggctgagacaggagaattgcttgaacccgggaggcggaggctgcagtgagccgagatcatgccactgcactccaccctggggaacaagagcaaaactccacctcaaaataaataaataaataattttgtggtgatttgtttacctctcagtgtgtgtgtgtgtgtgtgtgtgtgtgtgtgtgtgtgtgtgtatttatttatttttttgagatggagtctcactctgttgccaggctggagtgcagtggtgtgatctcagctcactgcaacctccgcctcctgggttcaagcgattctcctgcttcagcctcccgagtagctgggactacaggcatgagccaccatgcccagctaatttttgtatttttagtagcgacggagtttcaccatgttggtcaggatggtctcagtctcgacctcgtgatccacccacctaggcctcccaaagtgctagggattacaggcgtgagccaccacgcctggccacctctcagtatatttctcatatgctagtatctgaagctgcaggctatccgttccaatggttgtggtgtttagactttttcacggttttgtttttgtttgctttgtggaaaataatgctcctactatttttgtttcagtctgcaagtgcaaacgcacaataaattctctggtagttggaaaaaaattactggatcttggtcaagtttaaatttacaaacttaaaaaaagtggtggagtgtatcagttgatcctccgtttgtacatgattgttctctgtagtcatcaacactaatgttatctttttttttttttttttttttttgagacggagtctcgatttgtctcccaggctggagtgcagtggcgcgatctgggctcactgcaagctccgcctcccgtgttcacgccattctcctgcctcagcctctcgactagctgggactacaggcgcccgccacttctcctggctaattttttgtatttttagtagagacggggtttcactgtgttagccaggatgctctcgatctcctgacctcatgatctacctgcctcggcctccccaagtgctgggattacaggcgtgagccaccgcgcccggccactaatgttatcttaatcgactagttttgtcttcctactcagtttgaagtgggaactatttgacatttatatcctcattagcaaggagatgaaccttttttttctgtttttttttctttttattatttagtaaaaggctatatatgaaatctttatttatttatttatttttattttatttatttatttttttgagacggagtctcgctctgtcgcccaggttggagtgcagtggcgcgatctcggctcactgcaagctccgcctcccgggttcccgccattctcctgcctcagcctcccgagtagctgggactacaggcgcccgccacggcacccagctaattttttgtatttttagtagagccaggatggtctcgatcttctgacctcgtgatccacctgccttggcctcccaaagtgctgggattacaggtgtgagccaccgcacctggcctgtctttatttatttttggctggagtgcagtggtatagttatggctcactgcagccttgactttgcaggctcaagcaatcctcccacctcagcctcccaagtagctgagaccacaggcgtgcaccaccacgcctggccaagttttgtatattttatagagacagggtttcaccatgttgcccaggctggtctcgaactcctgggctcaaacgatctgcccacctcagcctcccaaagtgctgggattataggcatgagccatcacgcctggccaaaatgtttattttctattaaatgtaaatgtaaataaaccttacagagagcacccaggcatgcagatggacttgtcacgagggagagctccctggagccaaatttcttcctgctcagaccatagtcctaattacttaagaaaaccccttctaactgtgtggatcttttaacgtatggtgcacatgagtgcatggaaatgagagaacctgggacaacagcccctagagtgtctgtctgggatcacttcctcctgaaactggagaaaggggatttatgttcttttttttttttttttttttttttgagatagagtctcgctctgttgcccaggctggactgcagtggtgcgatcttggctcactgcaacctctgcctcccgggttcaagcgattctcctgcctctgcctcccgagtagctgagattacatgcatgcaccaccatgcccaactaatttttgtatttttagtagaggcagggtttctccatgttggccagggtggtctcgaactcctgacctgaggtgatccacctgcctcggcctcccacagtgctgggattacaggcatgagccatcctgacccagattttatgttcttttggaggtatgaaattacctgttaattttataatcatgggcaaattcaccatcagaccattgtggacatcagtgaagtcccctgaaaattgatactgtcaatctattcttcaaggtcagcaaagcccagatgacatgattatggatcttccagaaagtgctcttctgacattttatctcaatgtgtatatgtatttgtgctaaaaattggttggaagcagttctgaggctcatgggtataacgattttgtgaaagtctaagttgtgagggccccttccttgtgcctgagctgtcttcccagtaacttcctagtctcacgaaatgggacagaaagtaaaaggaaaaactgggtctatgatagatattacacacacagccgggcgtggtcgctcatgcctgtaatgccaacacatagggatatatatatatcggaaacaagttgaaattaatacgtctctaaaagagtatttccattcagtcagcagaatctgagtgcttctgatggcctcaaatacttcaggacgatataggcagctagaccttcttaaaagttggatttccacaagcctcctggcctctcatgtataacaaaaggggatagaagattctcaatgtgtatttacttattaaaacctccacctcggtggggggtcagcccccctgcccggccagccgccccgtccgggagggaggtggggggggtcagcccccccgcccggccagccgccccgtccgggaggtgaggggcgcctctgcccggccaccaccccgtctgggaggtgtgcctaacagctcattgagaacgggccaggatgacaatggcggctttgtggaatagaaaggcgggaaaagtggggaaaagattgagaaatcggatggttgccgtgtctgtgtagaaagtagacatgggagacttttcattttgttctgcactaagaaaaattcctctgccttgggatcctgttgatctgtgaccttacccccaaccctgtgctctctgaaacatgtgctgtgtccactcagagttaaatggattaagggcggtgcaagatgtgctttgttaaacagatgcttgaaggcagcatgctcgttaagagtcatcaccactccctaatctcaagtaatcagggacacaaacactgcggaaggccgcagggtcctctgcctaggaaaaccagagacctttgttcacttgtttatctgctgaccttccctccactattgtcccatgaccctgtcaaatccccctctgtgagaaacacccaagaattatcaataaaaaaataaattaaaaaaaataataaataaaaaaaataataaaaaaaagactgtctcaaacaaaaaaaaaaaaaaaaaaaaacctccacctcatttaatcccatatcttaaggaatgctgaatgatttgggtaataagaaattaggctgtgggctgggtatggttattcatacctgttatcacaacactttgggaggccggggcaggaggatcacttggggccgagagttaaaggtcaacctggacaatataacaaaaccccagccggaggcagtggctcacgcctgtaatcccagcactttgggtggccgaggagggtggatcacgaggtcgggagttcaagaccagcctagccaagatggtgaaaccccatctctactaaaaatacaaaaaattagctgggcgtggtggcacgcgcctataatcccagctacttcggaggctgaggcagagaattgcttaaacctggaggggcggaggttgcagtgagccgagatcgcaccactgcactcctgcctgggttacagagtgagactccgtctcaaaaaaaaaaaaaaaaagaaagaaaaaaaacccatttatctgggagtggtgttgcacatctgtagtcctaactactcgtgaagctgaggcaggaggatgtcttgggggcccagggatttgaggctacagtgagttaggattgctgcacttgagcctaggtgacagagcaagaccctgtctcttagaaaacaacaaacaaacaaacaagaaataagaatttatctcataaagaattgaagatcttgcctgtaatctcagcaatttgagaggccaaggctagtgaatcgcttgagctgaggagtttgagaccagcctgggcaacatggcaaaaccccatctctacaaaaaatatacacaaaatacttacctaggtgtagtggtgtgttcctgtagtcccagctactcaggaggctgaggttggaggattgcttgagccgggaggactaggctccaatgaactgtgattgtaccactgcactccagcctaggtagcagagcgagaccatctatgtctcaaaaaggaagaaaaaaaaattgatcctaaaatttgtctcatttgtgtaggatttctttcatttttctaagttgaactagatactaccattagagagcaataggacttacagtgaccacagtgaagatgtagctataagtttatgtgttcaatgtgctgttacatttctaacaattgagtcatgcactaaatgtttggagaccacaaaatcgtgtgtgaatttcttatgaattgaggatacctctcatccttgtcaatctcacctattctctacttatattggatgtttcaggactcagtggcttttgaggatgtgtctgtgagcttcagccaggaggagtgggctctgctggctccttcacagaagaaactctacagagatgtgatgcaggaaacattcaagaacctggcatctataggtaaggatgacatcattttttcttttttctttttttttttttttggggggggacagagtttcactattgtccaggctggagagcaatggcacaatctcagctcaccacaacctcagcctcccaggttcaagcaattctcctacctcagcctcccgagtagctgggattacaggcacgtgccaccatgcctggctaatttttttctttttagtagagacgggatttcaccatgttggtcaggctggtcttgaactcctgaccacaggtaatctgcccgcttcagcctcccaaagtgctgggattacaggcatgagccactgtgcctggccttcttttttttttttttttttgagtctcgtcctgttccccagggtggagtgcagtggcgggatcttggctcactgtaacctccgcctcctgggttcaagcaattctcctgcctcagcctcccgagtagctgggattacaggtgcccaccaccatgcccggctaatttttgtatttttagtagagacggggttttatcatgttggccaggctggtctcgaactcctgacctcaggtgatccacccgcctcagcctcccaaagtgtggggattacaggcatgagccaccgcaccccagtgacatcattttttcatatcgtcagttagagaactgccatttcttgctcataatcactgttccgagatttggaatctgaaaaggaaacacttctgtaaataaaccaggcatggttacagctcattgtgaacctataatctaataatatttgtataatttttaataatttatcatgattattcttgatctacattttaggggaaaaatgggaagacccgaatgttgaagatcaacacaaaaaccaaggacgaaatctaaggtgagttgcactcacaagaagtaacagtgttccttgaaagaatcttaaaaatgttatggccgggcacggtggctcacacctgtaatctcagcactttgagaggctgaggtgggtggatcatgaggtcaggagttcaagaccagcctggccaacatgatgaaaccccgtctctactaaaaatacaaaaaaagttagccagttgtggtggtgggcgcctgtaatcccagctactctggaggctgaggcagagaattacttgaatccaggaggcagaggttgcagcgagccgagatcgcgccactgcactccagcctgggcaacagagcgagactctgtctcaaaaaaaaaaagaagttgtgacacttttaaaacaagaagcaagcttagctccaaatttatttatttatttgttttatttattttttcttgagatgaggttttgctctgtcactcaggctggagtgcagtggcatggtctttgctcactgcaacctccacctcccgggatcaagtgattttcctgcctcagcctcccaagtagctgggattacagggacgtgccaccacacctggctaatttttgtatttttagtagagacagggtttctccatgttggcaaggctggtctcaaactcctgacctcaggtgatctgcccgcctcagccttccaaagtgctgggattacaggcacgagccactgggccccaaatttatttattatcagaaaatgtttaccaaaaatgttttctcaagtgacacagatgtccactggctgaaaaatattatacttgggccgggcactgtgcctcacgcttataatcccagcactttgggaaggtgaggtgggcggatcaccagaggtcaggagatcaagaccagtctggccaacacagtgaaaacctgtctctactaaaaatacaaaaattagccgggtgtggtggcacacacctgtcatcccagctactcaggaggctgaggcaggagaatcacttgaacctgggaggcagaggttgcagtgagcccagatcgcaccactacactccagcctgggcgacagagtgagactccatctcaaaaaaaaaaaaaaagaagaagaagaagaaagaaaaatattgtacttgggaacagttttgtttgtttgtttgttttgtgaaacagagtctcgctctgtcacccaggctggagtggagtggtatgatcttggctcactgcaacctctaacccctgggttcaagcaattcttctgcctcagcctcccaagtagctgggattataagcgcgcactactatactgggttaatttttgttttgttttgttttttttgagacggagtctcgctctgtcaccaggctagagtgctgtggcgcaatctcggctcactgcaacctcccactccctggttcaagggattcttctgcctccgcctcccaggtagctgggattacaggcatgcatcaccatgcccggctaatttttgtgtttttagtagagatagggtttcactatgttggccaggatggtcacgatctcctgacctcgtgatctgcccacctcggcctcccaaagtgctgggattacaggcgtgagccaccatgcccagccaatttttgtattttttagtagagatggggtttcactatgttggcctggatggtctcgatctcctgacctcgtgatctgcccgcctcggcctcccaaagtgctgggattacaggggtgagccaccatgcccagccaattttgtattttttagtagagatggggtttcaccatgttggccaggctggtctcaaactcctgaccccaattgatccacccacctcggcctcccaaagtgctaggactacaggcatgagccaccatgccaaggtgtggaaacagtattttattttatttttatttttatttttgagacgaagtcttgctctgtcacccaggctggagtgcagtggtgccatctcagctcactgcaagctccgcctcccaggttcacgccattctcctgcctcagcctcccgagtagctgggactacaggcgcccaccaccacgcccggctaatttttttgtatttttagtagagacggggtttcaccctgttagccagggtggtcttgatctcctgacctcatgatctgcccgtctcggcctcccaaagtgctgggattacaggcgtgagccactgtgcccgcccagaaacagtactttaaagcctcacatataatttccggaagccaaggtgagcagatcatttgagctcaggagttcgaaaccagcctgggcaacaagacgagaccctgtctctacaagaaacagaaaattcagtcagttgtggtggtgcatgcctgtagtcccagctacatgggaggctgaggtgggaggattgattgagcccgggaggtcaaggctgcagtgagccatgattgcatcactgtactccagtgcgggtgacagagtgagactctgtctcaaaatgaaaccaaaaaaaaaaaaacccatacctcaatattactgttttgataatagctatcagtgacacaagccctcttgcagaacattgagtatattcgtttttaaacaagtcagacggggcagaaaactatttccctgaaaatgataaaaatttagttctgctgccgggtgcggtggctcacgcctgtaatcccagcactttgggaggccaaggcgggcagatcacttgaggtcaggagttcaagaccagcctgaccagcatggtgaaaccacggctttactaaaaatacaaaattagctgggcgtggtggcgcatgcctgtaatcccagctacttgggaggccgaggtaggagaattgcttgaagctgggaggtggaggttgcagtgagctgagatcgcaccattgcactccagcctggggaacaagaacaagactccgtctcaaaaaagaaaaaagaactttagttctactacccgataatacatataaaatcattaatacacaaccagtattaccgtgcttctaattttttacagaagccatacgggagagagactctgtgaaggtaaagaaggtagtcaatgtgcagaaaacttcagtcccaatctcagtgtgacgaagaagactgccggagtaaaaccatatgagtgtactatctgtggaaaagccttcatgcgtctctcatcccttactagacacatgaggtctcacactggatacgagctatttgagaagccatataaatgtaaggagtgtgagaaagcctttagttatctcaaatcctttcaaagacatgaaaggagtcacactggagaaaaaccctataaatgtaaacaatgtggaaaaaccttcatatatcaccagccctttcaaagacatgagcggactcacattggagaaaaaccctatgaatgtaagcaatgtggaaaagctcttagttgttccagttcgcttcgagttcatgaaaggattcacactggagaaaagccctatgaatgtaaacaatgtgggaaagccttcagttgttccagttctattcgagtacacgaaagaactcacactggagagaaaccctatgcatgtaaggaatgtgggaaagccttcatttcccacacaagtgttctaacacacatgataacacacaacggagatagaccttataaatgcaaagaatgtggaaaggcattcatttttcccagttttttacgagtacatgaaagaattcacactggagagaaaccctataaatgtaaacaatgtggtaaagccttcagatgttccacctccattcaaattcatgaaagaattcatactggagagaagccctataaatgtaaagaatgtgggaaatctttcagtgcacgcccagcctttcgagtacacgtgagagtgcatactggagagaaaccctataagtgtaaagaatgtgggaaagcctttagtagaatcagttactttcgaatacatgaaaggactcacactggagagaaaccctacgaatgtaaaaaatgtgggaaaactttcaattatcctctagatttgaaaatccacaagagaaatcacactggagaaaaaccctatgagtgtaaggaatgtgcaaaaaccttcatttctcttgagaactttcgaagacacatgatcacccacactggagacggaccttataaatgtagggactgtgggaaggtgttcatttttcctagtgcgttacgaacacatgaaagaactcacactggagagaaaccctatgaatgtaaacaatgtggaaaagcctttagttgttctagttacattcggatacataaaagaactcacactggggagaaaccttatgaatgtaaggaatgcgggaaggcctttatttatcccacaagctttcaaggacacatgagaatgcatactggagagaaaccctataaatgtaaagaatgtgggaaggcctttagtcttcacagttcctttcaaagacatacaagaattcacaattatgagaaacctcttgaatgtaagcaatgtggaaaagccttcagtgtgtccacatccttaaaaaaacatatgagaatgcacaatcgatagaaactctataaatgtgagaaataggagaaagttttcaattctaacagatgctttcaaagttgtgaaaattcccactgaagagagaaatcctgtcaatgtaagtaatatagaaagcgagatacaagatgattcatgtatagtcaggtaccacataatcatgtttcagtcagcaatggaccatataggttggtagccccataagattatataacacctaaaacatttctatcaaccgcaatttagtagcagtagtaacaccatagtgcagcacattatttaagtgtttatggtgctggtgtaaacgtgctgcactttcagttgtataaaagtacaagacagcggccggggacggtggctcacgcctgtaatcccagcactttgggaggccaaggcgggcggatcacgaggccaggagatcaagaccatcctggctaacacggtaaaaccccatctctactaaaaatacaaacaattagccgggcgtggtggtgggcgcctgtagtcccagctacttgggaggctgaggcaggagaatggcataaacccaggaggccgagctgacagtgagctgagatccggccaacagagcgagactctgtctcaaaaaaaaaaaaaaaaaaaaagtacaacacagctgggcatggtcacacctgtgatcccaacactgggagactaaggcagtaggattgcttgatgccaggactactctggtcaacctagtgagaccctgtctctacaaaaaataaaaacattttctaagtgtggtagcacaccctgtagtcccatctacatgggaggctgaggcaggaggattgcctgagcccaggagttcaaggctacagtgaaccaagatcacgtgatggcagtccagcatgggtgacagtgagactgtatcaaaaaaaaaaaaaaaaaattggctgggcacagtggctcatacctgtaatcccagcactttgggaggctgaggtgggagaatcagttgaggtcaggagttcaagaccagcctggtcaacatgatgaaaccctgtctccattagaaatacgaaaattagctgggcgttctggtgtgcctgtagtcccagctacttgggaggccaaagcaggagaatcgcttgaacccgggaggtggagattgcagtgagctgagatctaccactacactccagcctgggtgacagagcgagactccgtctcgaaaaaaaaaaaattacagcacagatgtgcaatatatacttgataataaatggctaagttactggtttatatatttacaatcctgttttagaatgtattcctgtgtttttttaacagtaagacagtctcaggcaggtccttaaggagatattcccggaaaaactttgttatgataggcgatgacggctccatgtgcaggactgcccctgaacgtattctggcgggacaaaacatggaggcagaagacaatgatattgatgatcctcaccccgtgtagtcctacactaatgtgtgtttgtgtcttagttagtctttaacaaaaatagtttaaaaaaatttaatagaaaaagcttatagaatatggacataaaatatttttgtacagctgtacaatgtgttttaagctaaattattacaaagtttttaaaaataagtttataaagaaaataatgtacagtaagttaaggtttattcattattgaggaaaaaatgtttttatgaatgtagtgtagtccaagtgtacagtgtttataaattctccattagtgtacagtaacatcctgggccttcgcattcactcaccactcaactgactcacccagagcaacttctagtcctgcaagctatgttcatggagtgtcctatgcaggtgcatccttttttatcttttatactgcatgtttactctgtgtattttctgtgtttagactcataaatacttaacattttgttacaatttcctacagtgttcagtacaacaacatgttgtatggtttatagcctagtagcaatagactgtaccatatagtctagatgtgttgtagctataccatctagatttgtgtaagttcactttgtgatgtttgtaccatgaggaaatcacctacaacacgtttctcagaacatatacccatgattaagcaatctctgcctgtaaaatgctccagaaaattcacaccatgatataaattcatcacacacgatataaaagttaaggcaaggcatggtggctcatgcctgtaatcccagcactttgggaggccaaggcaggcagatcacctgaggtcaggagttcgagaccagcctggccaagacggtgaaaccccatctctactaaaaatacaaaaattacctgagcgtggtggcatgcacctgtaattccagctacttgggaggctgaagcaggagaatcatttgaacctgggaggtggaggctgcagtgagctgagattgtgccactacactccagcctgggcaacagagcaagactccatcccacacaccaaaaaaaagttaaaaattttttatcactggctcattcttcaagtacatctctggactatgaattgtaacttaactacttttccaagaagtcttggaagtgagataattctgtaagtactctttaagcagtggtcaaaagtttaaaaggttgtgttttctcattaaatcagttagtaaaacttttctctttctcttgatgtcttgattcatgagtaaactgaagtgtattttttttttttcgagacggagtcttgctctgttgcccaggctggagttcagcggtgtgatctcggctcactgcaagctccgcctcccgggtccacgccattctcctgcctcagcctccccagtagctgggactgcaggcgcccgccaccatgcccagctaattttttttgtatttttagtagagatggggtttcaccgtgttaagccaggatggtctcaatctcctgacctcgtgattcgaccgcctcagcctcccaaagtgctgggattacaagcttgagccaccgcacccggcctgaagtgtattttttttttcttttaaagaccagtgttagtagaagtgtatttttaatatacaattagttttaatttgtgtatagtttttcagttgttctctgaataaagagattgttgaatactgacacactgtaactaggatttttcctactggcctcatgtggaaggtggtgcatatattacccattatatatttatttcaccttttccgaaaaactgctttttaaatttcttggccagacacggtggctcactcctttgtaattccagcactttgggaaaccaaggcaagcagatcacttgaggtcaggagttcgagaccaacctggccaacatggtgaaatcccatctctactaaaaatacaaaaattagctgggcatgttggagggcacctgtaatctcagctacttgggaggctgaggcaggagaaatgcttgaacctggaagtcagaggttgcagtgagccaagatcacaccactgcactccagcctggacaacagaacgagactccatatcaaaaaaattaaattaaaatataataaatttcttgccgggcgcagtggctcacacctgtaatcccagcactttgggaggccgaggtgggcggatcacgaagtcaggagattgagaccatcctggctaatacagtgaaaccccgtctctactataaatacaaaaaattagctgggcatggtggcgggcgtctgtagtcccagctactcaggagtctgaggcaggagaatggtgtgaacccgggaggcggagcttgcagtgagccgagatcgtgccactgcaatccagcctgggcagcagaacgagactccatctcaaataaataaataaataaaatgaatttcagctagaagagccttattccattttcctttttattaaacatctggcataagttggtaagtatgtgaagtttatcatatattcttatgcgaattattattttcgccttttttttataattctgtctgggatttgaatagtagagtttgaattcaggaaggacacctgtgataggacaataaaatctagagctggacgtggccctcctgctacctgtcgacacaggtaaatttcctagaatctgttccctttatagatccatgttgaaattcacttatagcctcacttgcatgagatttgccaggcagaagtgaagaagacattagtcaggtattggaaccccaccatacagggagacagcctgcttcctgctcattttcctggttattttctctgccaatcaaaagtatcctgaaaacaccctgagctgcttgacttccattctcaaagagatgtgttggtttccacagttgtctccacaagctccgcatcaaagatccacgtacagtttggattttccttctagccttcatgtgtggcccaagcatctatttcagactgtcatggttggcattgttctctgaggttctgtcttccctttgtgtttctatgagctttaatttgtatggttcttgttctgttaatgccactagggactatgtattcctgattccaccatgacagctacagtaaaacagtaaaaaaaaaaaaaaacaactatatgggagtttgttctcttactgcattatacagtgactactctcccccatccttccatttgagaataatcaccttcctcatatcagacaaattgtgggtgtttccaactattcctgaatattctccatcggtttattttcatttatgtttggttgtatgcaactaaaataatgcattttttatttatttgaagcaaaagcttcttagatgtttcttagaaatattttgttaactgtttccaaacaacatgtatactatcaaatattatcatcatctgggtgcagtggctcatggctgtaatcccaacaatttgggaggctgaggcaggattgcttgaggcctgaagttggagaccagcctgggcaacatagtaagaccccatctctattagttcaaaaacaaataattgtcttccccgtttcctgaaaggctatattaaaatatcccattacagttatgaatattcagatcaactttgtcattttgtcaagatacattctgactcaatattagcatgtgcataaatgttctggtatttttcccttagatgttttttattcttatacttacattttgtcataaaacaaaattctcttcaaaacagtggtattttcagtgccctattgccagcaatcaccacggtcacacctgtattcagaattaattatggtaatacagtagtcaattctgatccaaagttttgctttctgtggttttagtcactcatggtcaaacacagtccaaaaatacttagtggaaaattccagaaataaatgtttcatagacttatttatttatttatttatttgagacagagtctcactctgtcgcctaggctggagtgcaatggcgcgatctcagctcactgaaacctctgcctccgaggctcaagcaattctcctgcctcagcctcccgagtagctgggattacaggcatgtgccaacatgcccagctaatttttgtatttttggtagagatagggtttcaccatgttggtcaggctggtctggaactcctagcctcaggtgatccacccacctcagcctcccaaagtgctgggattcctcccatcttacacatgaaaaaacagaggcagagagagcacagggtctttcccaaactcatgtaaatcagaattatagagtctcaaagttttgaagttctagtgtgttccaccacctgtcaaactttttttttttttttgagatgaggtcttgctctatcacccaggctagattgcagcggtgcgatcatagttcactgtcaccttgacttctggggagtgatcctcctgcctcagcctcccaagtagttgggactgcaggtgcatgcttccataagcggacttagaaaatttgaatgaggccgtactgggtgcctcatgcctgtcatctcaacactttaggaggctgaggtgggaggatggtttgtgcccaggagttccacgtggcagtgagctgtgattacaccactgcacagcaacctgggcgacagtgaggctcagtcgtgttgaaaaaagaaaagacagagagagaaagaaaagaaaaagagagaaagaaagaaaaagaaaggaaagagaaagaaagcaaaagaaagaaaagcagagatatgagagaaggaaggaaggaagggaaggagaaaaaaggaaaaaaaaaaagaactgagaccccatctctacaaaagtaaaaaattagctgggtgtggtggggcacacctgtgattccagctactccagaggctgaggtgggaggatggcttgagcccaagagttcgagcctgcagtgagccatgatcatgccactgcactcagacctgggtgacacagttcatgtcagccaccttccaaaacaggcaagaatgctatgtgtgtcatagcctataatttgtaccacattaaggttgctttgatctagggcagaacttatgagtcctttttttttttttttttttttttgagaaggagtcttgctctgccacccaggctggagtgcagtggcgcgatattggctcactgcaagctccgcctcctgggttcacgccattctcccacctcagcctcctgagtagctgggactataggcacccgccaccatgcctggctaattttgtttttatatttttagtagagatggggtttcaccgtgttagtcaggatggtcccgatctcctgacctcgtgatccgcccgcctcggcctcccaaagtgctgagattacaggcgtgagccactgcacccggccaaagcaccattctctaaaatccccaccaagcctttgtctccttgcagttagctcctctctgggtgtgctgcctggtggaaccctgtaatgtattttctttctttctttcctttttttttttttttttttttttttgagacggagtctcactctgtcgcccaggctgaagtgcagtggtgcgataccggctcactgcaacctccgccccccgggttcaagcgattctcctgcctcagcctcccgagtggctgggattacaggcgcccgccaccgcgcccggctaatttttatatttttagtagagacgggatttcaccatgttggccaggctggtctcaaattcctgacctcaggtgatccacctgcctcagcctcccaaagtgctgggattacagacgtgagccaccgcgcccggccaaccttgtctcttaaaagtaaaaacaaaatgagagataagaagaaatatttttggaaggcgcacaggggaataaagccaccagggcattttaatcataaactccttgtcccatcaaggccatccctaccctttgccctcccctccccaagacctaccctgccccgccccatcctggccccctccagccttcatccccctttttcccctctttccccactttgtctcctcttccccactttatcacctcttgcccctgtgcggccccgccgaactggaaacgtttccagcaggtgattcagatgcgcctgtgcaggactgtgaccaggtgcaagtcgccctcccctgacctccctgtttagcctgaatgatccttcccaagtgtgttgctccattctcgcgctgctataaagaactacctgagctgggcgcgatggctcacgcctgtaatcacagcactttgggaggctgaggcgggtggatcacctgaggtcaggagtttgagaccagcctgactaacatggtgaaaccccatctctactactaataataaaaaaattagccgggcgtcatggctcacgtctgtaattccagctactcaggaggctcaagcaggagaatcccttgaacccgggaggcagaggttgcagtgagcggggatcacgtcattgcactccagcctgggcaacaagagtgaaactccgtctcaaaaaaaagaaaaaagaaaaaaactacctgaggctgggtaattcacgaataaaagaggtttaattgactcacagttctgcaggctgtacaggaagcaaggctgggaggcctcaggaaacttatcaaggcggaaggctactggggatcgagtcagtcttcacttgaagcaggagggatcaggagagagcacgaagtgggaagtgccgcacatctttaaaccatcagatctcctgagaactatcacgagaacagcaaggggaaagccgcccccatgatctaatcacctcccagcaggtccctctcctggtattagaaattaaaattgaacatgagatttggttggggacacacagccaaaccatatcaccaaggttttctgtaagtgtctgatgaatacgcacagtgggaactgcagctgagctttaggtggcatcctaaaagcctctttgtcagcctgagcccgtgtcctcttaagagggagagttggggctgggtgcggtggctcacgcctgtaatcccagcactttgagagaccgaggcgggtggatcatgaggtcaggagttccagagcagctggccaacatgatgaaaccccgtccgtactaaaaatacaaaaattagccgggcgtggtggcgggcgcctgtaatcccagctacttgggaggctgaggcaggagaatcgcttgaacccaggaggcagaggttgcagtgagccgagattacaccaccgcactccagcctgggcaacagagcgagactctctcaaaaaaaaaaaacaaaaaaaaaaaacggggtgggcgacttggaaaagatttcaggactcactctcagcgacggtgccccacgtgagttggaggccaggagcaaggtgccttcctgggcctccctggctgcgatcctgtcctcaggagggcgaccccagtcacgtgcgaccgctcaaggcggtcctcagaagcggaggggacctccgcgggccagtaggccttcagaattcttagaaatcactcacccccgtcctgcagtgacaatctcaggagagcctgtctacagactggcgcctgtagagaagatcctgccattgcccctggcttccaggaactgaactggattctgagcatcatggcagaatcttatcccacctatgcagcaggctagctccagggagaaaatataaacgtcaggccgggcgtggtggctcacgcctgtaatcctagcactttgagaggccgaggcaggcgtatcacgaggtcaggagatcgagaccttcctggctaacacagtgaaaccccatctctattaaaaatacaaaaaattattcaggcgtggtggcgggcgcctgtagtcccagctactcgggaggctgaggcagaagaatgacgtgaacccgggaggcggagcttgcagggagccaagatggcgccactgcactccagcctgggcgacagagccagactccgtctcaaaaaaaaaaaaaaaaaagaaaagaaaatataaacgccaacaaacaggtaattcccaatcaccggcaagaccccgccggattggaccccgaccctcagcagaggccaccttgtccgggtctcactctaacctgtaccgcggccccaagatatcagaggctgccttggtggacccggggcactttccacagaactccctgaatggccaaggctggccctggcctcaataggccaactcagcaaacgtggagaaggcagggaacggtgggtaagggaagtcatcccaacattttgggagtccgaggcgttatatggcttgaacccaggagttcaagatcagcctgggcaatatagcaagaccccatccttttttgagactgagtcttgctctgtcgtccaggcgggagtgcagtggtgcaatctcagcttactgcaacctctacctcccaggtttgagcgattctcctgcctcaacctcctaagtagctggaattacagttgcccgccaccacgctcggctaatttgttttttgttttttgttttttgcttttgagacggagtcttgctctgtcgcccaggctggagtgccgtggcgcaatctcggctcactgcaagctccccttccggggttcatgccattctcctgcctcagcctcccgagtagctgggactacaggcacccgccaccacacccggctgtttttttgtatttatagtagagacggggtttcaccatgttagacaggatggtctcgatatcctgacctcgtgatccgcccgcttcagcctcccaaagtgctgggattacaggcgtgagccaccgggcccagcctttttttttttatttttagtagagacaggtttcaccatgttggccaggctggtctggaactcgtgacctcaagagatccacccacctcggcctcccaaagtgttgggattacaggagtgagccaccgcaactggctaccatttctaataaaagcaaacttttgttcaagtgtattcatcaaaaaggcccctcgcatgtgaccacagccaagccaggaagccttcttcaggtatccctagccagcctgcaggaggtcttggaaacttgttcaacggataaatataactgggcccacaaagaatcacaggaatacttaatccctccagcctccagggccagcctggccccagctgtgtaggggggcttagaagtgtcttcaggactcatctaactaccaggcccaatctggcggtgggcagaacctggggcccttcccacagcagtccgaggaccttcctgactgtgatcctggccccagcagggggacctagaaaacgccaatgaagctgtgggcaagcaggcaccaggtgggaaagcggccaagctcagggcaccctactccgctcacctgcgacggcagcagccagtccccacgggcggaggggacctcatgcgacattcagcccgcgagattctcagagactgctcgcccgcaacacgcagtaacgatctcaggagagcccatgatggggcggcgcgtgtcgtagccgagaagactctgtcatcgccggcgacctcctggaactctctcttgcggtttgcagccagatcacttcccatacacgcggcagccaagctcaggggatggcatcagactgaccctaggtggcgctcgaacacccgccggacctcaccagacaggcactttccccagtctacaccgcctggttcgggtcccacatgaacctgtaatacactcggcccaaagcggtcagaggatggcctggtgggcccggggcaccctccacggaactccctgaatggccagggctgatcccagcctccataggcagacagaaaatgtgaatgaagccctgctggatgcctcatgcctaccacctcaacactttgggaggccgaggcgggaggagagatgtgccctggagatgatgcagtgcgctatgatcgcatcattgcacagcagcctgggtgacagcgagactcggtcgcgggaaaaataaaacaaaaaacaaaaacaaaccaaaaaaaatgaaagagagagggagagggagggtggaaggagggaggaaggaagggagagagggagggagggaaggagggaaaaagaaagagaaaaggaaaaagaggccgggcgcggcggctcacgcctgtaatcccagcactttgggaggccgaggcgggcagctcacctgaaattgggagttcgagaccagcctgaccaacatggagaaaacccttctctactaaaaatacaaaaattagctgggtgtggtggcgcatgcctgtaatcccagctactagggaggctcaggtaggagaatcgtttgaacccgggaagagcaggttgcagtgagccaagatcccgccattgcactccagcctgggcaacaagagtaaaactctgtctcaaaacaaaacaccaaaaaaaaaaataaataaaaaataacccacaagagtgaaagtctgtctcaaaaaaaaggaaagaaaatgaagaagaacattcaagatggaaggaagggagggaagggaaagaaagaaaggagggagggagtgagggagggaaagaaaaagaaagagaaaagaaaaaaaaggaacatttgggaaggcccacaggggaatgaagccacaacaatatcctactcagaacctccttctcccatcaaaaccatccctctacctccccttccccctgctttccccgccactgcttctgcggctcccagtgatccccctccttttaccctccccgtccctctcttcatgcccctattcctatctcctatcactcagaattggcaacgttttcagcaggtgcttcagacgcgtctgcataggactgtgaccaagtccaagtcgcccacccttagccctccctgtttggccccagtcatccctccagacgttttctgaaggtgtccgatgaatggtcgccatggaaactgcagctggggtctgggtgccctccttcatcctccctgtatgcctgggcgagtgtcccttcttaaaaggggccttgggaaaaatttcaggacgcactttctgcgacggtaccttatgtgagtcggtgggcaggagctgtgtgccctctggggtccctggctgcgatcctggccccaggaaggggacctagaaaacttttccagtaggctgggcatgggctcatgactgtaatcctagcagtttgggaggccgaggcaggcagatcacttgaggtcaggagtttgagcccagcctggccaacatggtgaaaccccgtctctactaaaaatacaaaaattatccgtgcgtggtggcacgtgcctgtaatcctagctactcgggaggctaaggcaggagaatcgcttgaacccaggaggcagaggttgcagtgagccgagatcgcgccactgcactccagcctgggcaacagagcgggactctgtcttcaaaaaaaaaagaaaagaaaaagaaaaaaagaggcccggcgcggtggctcacgcctatgtaatcccagcgctttgggaggccgaggtgggcggatcacgaggtcaggagatcgagaacaccctggctaacacggtgaaaccccgtctctactaaaaatacaaaaagccgcgcctgtagtcccagctactcgggaggcggagtttgcagtgagcaccactgcactccagcctgggtgacagaccgagactccatctcaaaaaaaaaaaagaacgaaaatgtatccagtgatgctgtgaacaacccggcaccagatgggaaagcggctgagcccagggcgccctaccccattcacctgcgacggcaccagtcggtctccaagggcagagggaccttcatacgccactcttcttccgcgattctcaaagattcccatcccgcagtaatgatctcaggctcccccggatcccgcagtaactatctcaggagagtccattatgcagcaccgcgtgtggccggccgagaagaccttgccatctccttcggtctcctggaacactgtcctgggctctccggccggatcttgtcccacacacgcgacaaccgagctccggggacgatatcagagtgatcacaaagtggcgcccgaccaccggtgggactgcgccggacctggaccttcccctaccggaccagatgccacctggtcagggtctcactccaacttgtgtctcggcccaaagcagtcagagggtagcctgctgggcccgggccaccctccacggattccctgaatggccagggctgattcccagcctctacaggctggcttagaaaaattagggagaggctgggcatggcagctcaagcaagtcatcccaacactttgggaggctgagacggggggattgcttgagcccaggattctgaggttgcagtgtgttttgatcaggccagcacactccaacatgggtgatagagggagtcccagtctcccttcccgggttcatgccagtctcctgcctcggcctcccgagtagctgggactacaggcacccgccaccatgaccagctaattttttgttgttgttttttttttttttgtattttttaggtggacaggaagtagaatttattggtgagtattaagaggggggcagcacattggaagccctcatgagtgcagggcccaccacttgtccagagggccacgattggggatatacttgaccccacagccatctgggatgagccgcttttcagccaccatgtcttcaaattcatcagcattgaacttggtgaagccccacttctttgagatgtggatcttctggcggccaggaaacttgaacttggccctgcgcagggcctcaatcacacgctccttgttctgcagcttggtgcggatggacatgataacttggccaatgtgaaccctggccacagtgccctggggctttccaaaggcacctcgcattcctgtttggagcctgtcagccccagcacaggacgacatcttgttgatgcggatgacgtggaaggggtggagccgcacccggatatggaagccatctttgccacaactttttaccatgtacttattggcacaaattcgggcagcctccagggcttcagaggacagctgctcatattcatctgacaccatgtggccacagagcggaaactcatccacttttgcctttttccgccccaggtcaaaaatgcgaatcttggcatcagggacacctcggcagaagcgagactttgggtacggcttgttcttacaataccggtaacaacgggcggggcggcggcccatggcgacaccaggatcttcagtggcacactgaagggaaagagaaattttttgtatttttagtggagatggggtttcaccatgttggccaggatggtctcaatccggagactttttaaggttttcagggggttcatcctgtggccagattctatgcagcaggacaactatgctggggtgcccttctcgggcctctctggctcacctgtaataatccttgtctttagagggtgacttagacaaattttcaaggagcacatccaggaaccaggccccatgtgtgaccaaaactaagcctgggttgctctgccctatggttcctagctgacctaagctgtttccttatccccaccccatccccaaggacttacaaatatttcctggaggcacatcccacaatcagaggcctctgcaggatgacagcccacctgtggtccttctgctggcctccttctttggctgcgaccagtccctaccactggctgggacacaggaaactttgcactcagagcctcctatgaaggagcccacatggggctgtgggcaaactcaggtcaccctctccaggcctctctggttggccaggtccaatctctcttcctggagagggacttataaaagttttctgcggaggagtcacatgttaaaacagggacgcatgtgggaccagggctgagcctgaagagtactccacagtcctccttactcagcccaggccagtcactaccataggagagggacttagaaatatttttggtgggggtgatacctccagtaacaggtccaatacggcagacaggtgcagggagcccttttcaggcctcacaagctggcccagccctccgtcaagaaggaaacttgaaaaagaacacatctgggctgggcgcggtggctcacgcctgtaatcccagcactttggaaggctgagacaggcagatcacggggtcaggagatcaagaccattccgccttacacggtgaaaccccatctctactaaaaatacaaaaaactagccgggcatggtagcaggcgcctgtagtcccagctactcgggaggctgaggcaggagaatggcgtgaacctgggaggcagagcttgcagtgagccgagatcgcaccactgcattccagcctgggcgacagagcgagactccatctcaaaaaaaaaaaaaagaaaaagagcacatctggtgaccatgccccaagtgggaccacagcagagtgtcccctggcaccccaccctggcatccctaggtggcccatgctaactggcccattggaggggttctcagaggaaacattagaggaccaacatgataccaccctccctgggcttccctgtccaccctgggccagtccttgtcatcagagggggcctaagaaacatatgctgttggtgcttgcaaactgaccccagaacacttaaaaactttttatttgtatttatttatttttttgagatggagtctcactctgtcaccaggctggagtgcagtgacacaatctcgcctcactgcaacctccgcctcctgggttcaagtgattctcctgcctcagcctcctgagtagctgggactacaggtgtgtgccaccatgcccagctaatttttgtatttttagtagagaaggggtttcaccatgttggccaggatggtctcaatcccttgaccttgtgatccatgtgactcagcctcccaaagtgctgggattacaggtgtgagccaccacgcactgcctactttttttttttttttctagagacagggtctcactctgtcacccaggctggagtacagtggagccatcatggttcactgcagcctcaaacttttgggctcaagcaatcctcccacctcagcctcccaagtagtagctggggattataaatgcacgccatcctatctggataattttctaatttttaatttttttttcaagagataggatccagactggttgcagtggctcatgcctgtaatcccagcactttgggaggccaaggcaggtggatcacttgaggtcaggagtttgaggccagcctggccaacatggtgaaaccccatctctactaaaaatacaaaaatgagccaggcatggtggggggcgcctgtagtcccagctactcggaaggctgaggcaagagaatcgctagaacccggaaggcggaggttgcagtgagccaagattgcgccactgcactccagcctaggcgacagagggagactctgtccctcacacacacacacacacacacgaagagataggatctggctctcttgcccaggctggagtgcagtggtgtgattatcacttactgcagccttgacctcctgtgctcaagcaattctcccaagtagttgggaatacagacacttcacccagctaattttttaaattttttgtacatacagggcctcattttgtggcccaggctagtctagatctcctgggctcaagtgattctctctcctcagcctccagagttgttaggattacaggagcaagccaccacacccggctctgggtcataaattctgtccccctctaacaagcaaataacagacaaaaaaaacccacactcagtcacagagcgacctgagtcttagtagtagcgttttaatggcagcagccccaagaggagagtcagagtctggtctgcccccggagcaggaggcttgggcttggagggcccatcccagcagacctaaccatccacctccttccattgaactgaggccaggaaagtgcggatttccatgggttccagcgtgatgttggccgggtccagctggtacggagtttggtggggtgtggggcctggagaggtgcagggggaaggaggagtgaggaggtgcagacttcctctgactcaccccacgatgcttcctcccctgggtctagacacagctgcatatccccgaatctgtctccagggcctcaatcccagactcttaacctgcttccccggccccgaataccacccccaggtccaatgtcctcataccctcaatctggccactgtcctcgtaccctcaatctgaccccaggggtgatgaacaccctcccagaactagacatggatggggattttcaaatcttgttcttgggactaaacagcacccacaaacctcaagacccattcctggtttgccgcacccatttcagatcctttaagcccctaacctgggtctggactctgccccataccctcatgacctttttgggtcctggccaacatcccatgcctcacacattgcccccacctgccggccccaggtaagactccaccccttccctacccctgaccagggccccacctgtgtttgttgtccacttgagcctggaggctgcctcgcggagctggttggccaccagcgtggtctcctgcaggcgggtgatggtgaaggtggagaacaggtcctgcggggaaggggatgggcccagatgagttggggcaaagccaggtttctcttctctccctctctcttgcctctctccgatctccttctcaattttgcccttctcaccctcaagttcaaggtaacgggggcgctcaggttacgtccggaatcctctcctacggcaaactggtgctccaagcgcagcagcaccatttcggggccccagctggccagcgtgagcaggtgcaccgagggcggcaggtccctgcgcagccctgagaactgcgggagagagggcggggctgagttggagaggggcggggcctggatggagaagggcggggccgagccaggtcaggaggcagggctaggttgtaggggcggggtttcgccggagaggggcaaggctcagccgagaggagcggccagggccgtgacagggaggactgagccaatggggagatgggtcggtcccaagcttagggttcgagtcccgatggagcagaactgatgtgacctgagactttgggagttacggcggggctgaagccgcggggctgggtgaggcaggacagagcctgggggcggtgagagggcggggctaaagtgaaatgggcggggccggaggtgagttggtggtttaggggcatgagctagggctgtgcctctacacagtccaggggggttgggactgggctggcactgggcggggactgcccaggggatggggttggcccgagggtttggggctaattatggccaaatggatccccgctgagcctaggaaactccgcacccaaacccggctccctggtagacttcaatccggtcctctctgcctaccccgctgcccctcacctgcgtgcgcggaggagccccgagattgtaggcggcgccgccacccggggccagcaccacctgaggggccaggacctcctgctccgccaggagccggtgtccggcggctgcagcctgggctgtgtccagcagcaccaggtggcgccctcgcacccacgcccccgacccgttctccattagtggctccgatactccgcgtccatcgtccttcagcagccttcggtgcacctggggggagagtggccaggagggggtgagagtcgtgggtttgtgggtgtccttgggccagaaactgggtaagggcgtgtgggaatgtcaaaagaaattaaagggtgggaggaacggatgaggatgaaggtgagggtctggtagggcaaccccagcagaggcaggatccaagtaggcatgggaaccaggccggaaggaggtaaatgcctaacaggggggcctggatatggcacgccagagcgtggagggagcctgggcaggagatggagaaaaacggagaggaaaagccacacacagaaatggagtccttggccgggagcggtggttcacgcctgtaatcccagcactttgggaggccgaggtgagtggatcacctgaggtaaggagttcgagaccagcctggccaacatggtgaaaccccatctctactaaaaataccaaaattagccgggcgtgatggtgtgtgcctgtaagcccagctactcggaaggctgaggcaggacaatcacttgaacccaggaggcagaggttgcagtgagctgagatagtactattgcactccagcttggacaacaagagcaaaactccgtctcaaagagaagaaaagaaagaaacggagtcctcagcttagtggggcctgaaagcagagaactgggccagaaacagccttcaaggtccagcaggggtccaggttgggaggaccctggctcggatggggctctgacccactcaccatgagctccagcgagccatctctcaggctgctgcccccctgggagcggtcagtcagcacagtcagctgcatgtttccatcctgggagttgaagggtgaaagtagagggcagtcaaccccaaccccaggcagctttgagatgctgcagataaggggtgattccctttctatcgaggtggggaggtgcaggatgggggagagctaccgtgatgtaaatccgggtgttgactggatagtagtttcctgccacgggctccgtctggttcagtttccaggtgggtcgataatcccgcctggggttgggggtgagctgatcaggcttgggatctggctccccaactcttttttttttttttttttttttgagatggagtctcgctctgtcacccaggctggagtgcagtggcgcgatctcggctcactgcaagctccgcctcccggcttcacgccattctcctgcctcagcctcccgagtagctgggactacaggtgcccgccaccacacccggctgatttttttgtatttttagtagagacggggtttcaccatgttagccaggatagtctcgatctcctgaccttgtgatctgcccgcctcggcttcccaaagtgctgggattacaggcgtgagccactgcaccctgcctggctcccccgcccttcactctcccttcgtcctctgtctcccacactcatgtaatcagcaaatttccctcaccacccctgggccccaacacaccacagaccaccccctcagtgctctcagtcaccccccacctcctctccaggatctcccggccattgctgtctgtgtagaagcgtccctttgtctccagcggtgtgtcaaaacggctgatgacctccttcccccaggtgtcgctgtacccaatgggatggcaaggttgtgagccttggataaacccctctgcccttgcttccacacccctctcccagcctgtgccactcaccccacaggtatcggccccaccgaccactctagctccaggtgccgctgtcctgggtacaggcgaaccacctgggaacaccaagctgagaagttctggtgcacctcctgcaccaagggtgtctgcgggcacacgggtgaggtggatgtcagtctgtacctgagcagaggtgagtcctacaaatgtcccccaaccctggccataaaccccattaaggcctacatcaaggtcaaccttcagtcaccgccacataattctttttttttttttttttttgagacggagtctcgctcttttgcccaggcgggagtgcagtggcgcgatctcggctcactgcaagctccgcctcccgggttcacaccattctcctgcctcagcctcccgagtagctgggactacaggcacccgccaccacacccggctaattttttgtatttttagtagagatggggtttcaccgtgttagcaaggatggtctcgatctcctgacctcgtgatcagcccgcctcggcctcccaaagtgctgggattacaggcgtgagccaccgcgcctggcccacataattcttttttctttttttttttttgagacagagttttgctcttgttgcccaggatggagtgcagtggcacaatcttgcctcactgcaacctccgcctcctgggttcaagcaattctcctgcctcagcctcccgagtagagggattgcaggtacctgccaccacccctggctaatttttgtatttttagtagagacggggtttctatccatgttggccagacttgtcttgaactcctgacctcagatgatctgcctgcctctgcctcgcaaagtgctgggattacaggcgtgagccactgcacccggcctctttttttttttttttttttgagacagggcatcactatgtaggcacctaatcagcaaatgctcccacctggtcttgaactcctatgctcagcgatcctcctgcttcagtctcccaaagtgctgtgattacaggcatgagccactgcatctggcttaccacatcactcttgagcgtggcataaacgcctcctgttcaccattgccccatagaataggattctagcttggcacatggctacctgggataaagactatattgtccagtcttccctgaggctatcagtagctgagtgaccagtttgccccatagaaagtgatccaagtggtgtcaacaatgttccttgcccctgtccctctgctactgactcaaacacaaatgtggcggctggagcttcagcagctatcttggaccatgaggtggaaactgaatattggggaaggcagagcaacaagatagaagaggaggtcctgggtgattatggaaccaccccactttctctggactaacagccagactttttgttagaagaaaataatcttctatcttattctagtcacagttaatttgggtaactctgttagaacaggcaaaactatatacagatatgcagacattcatctcaaagggactcacatgaaacgcgaggctcttgaatgtggacaaatgtgagttttgtcatctatgaaagtcaaacatcaatgagaggccctgggaaaccactgttcctagccagatgcacccataggcattcaccctgagactcacccaaacccaatcaatccaagggtggactctcaaatattcactccagatagaagctcctcttactacagactttggtgaattcttcaagcagtgatatttggctctcctgattcatgggccaagtgggaatgccccacccccaatttccaaaactaagtatgtaaacgtccacagcagatgtgaatggctttgtatgatgtgtcctatggggagactctcatacgaccagctatgaatatcaattctatggaaggaccctcaaatatttcccccgctgatctgtgggtcttagcccactgatctgaaggaaaagtaaatcctcccctaccctcactctacacatggcccaccaccctcttgggctccataacttccccattcccaactgcccactcatcattcctagtccctgaccttcaccaggtggatctgagcccagcggctcacaggcagcggtttctgttggttgggtctgaagatgtaggcacctgaggcctggtcactttcgttgtcacctatactggcgttgtacctggagttggggcaggtgagagtcaggtaaggggccctagctccatgccgagcaccaccaccccaccctcaggcctggtgatcttcccttaccagaagaaggtctggcgaacaggcagcaggagttgctgattcatgttcataatctccatcaacagccctgtgtcaggatcaaacgttgcccggatgtgctgggcagaaaagggtccacagatgggtttgtgtgtgtatgtgtgtgtgttttctttttttaatttttcttttttctttttttttttttgagactgagtctcactctgtagcccaggctagagtacagtggtgcaatcttggctcactgcaccccccacctcccgggttcaagtgattctcgtgcctcagctatccaagtagctgggattacaggtgcccaccaccccgcctggctaattttcatatttttagtagagacagggtttcaccatgttggccaggctggtctcaaacccctgaactcaagtgatctgctcaccttggcctcccaaagtactaggattacagacataagccactgtgcccagccggatttttattttttttttttgagacagaaacttgctgtgtcgcccaggctggagtgcaggggcgcaatctctgctcactacagcctctgcccctgggttccagcaattctcctgcctcagcctcctgggtagctgggattacaggcacatgccaccatgcctggctaatttttgtatttttagtagagacggggtttcgccatgttggtcaggctggtctccaactcctgacctcaggtaatccacccgccttggcctcccaaagggctgggattacaggcgtgagccactgcacctggcctgggttttttgttttttttttttttttgagactgagtctcgctctatcgcccaggctggagtgcagaaagtggcgtgatcttggctcactgcaacctccgcctcccgggttcaagcaattctcctgactcagcctcctgaatagctgggactacaggcacatgccaccacacctggctaatttttgtatttttattagagacagggtttcacaatattggccatgctggtctcgaactcctgacctcatgatccacccccccctcagcctcccaaagtgctgggattacaggcatgagccaacacgcctggcccctttttttctcaatttaaaatttttttagggccgagcgtggtggctcacacctgtaatcccagaactttgggagaccaagttgggtggataacctgaggtgaggagtttgataccagcctggccaacatagtgaaactccatctctactaaattaaaaaaaaaaaaatttaaatttgttttctagagatgggggtcccactatgttgcctggggctagtgtccaactcctgggctcaagcagtccaccacacccagccattcaacctgattttttttttgtttgcttttgagacagagtcttgctctgtcccccaggctggagtgcagtggcatgatctcggctcactgcaacctccacctcctgggttcaagtgattctcctgcctctccctcccgagtagctaggactacaagtgtgtaccaccacgcccagttaatttttgtatttttggtacagacgaggtttcactgtgttggccaggctggtctcaaactcctgacctcaggtgacctgccagcctcagcctcccaaagtcctgggattacaggcatgagccaacgtgcccaccccagccttttctttttttctttttttttcttttttttttttttgagacggagtctcactctgttgcccaggctggaatgcagtggcgccatctcaggtcactgcaagctccgccttccgggttcacgccattctcctgcctcagcctcccgagtaactgggactacagatgctcgccaccacgcctggctaaattttttgtatttttgtagagtcagggtttcaccgtgttagccaggatggtctccatctcctgacctcgtgatctgcctgcctcggcctcccaaagtgctgggattacaggtgtgagccaccgcgcccggcccccccaaccttattttcaacctcaccacctcttaccagggccttccagggccagtgcagtcaaccccttccaggtccctgcacttccacactggctgcctacagtctgttccccacaacagccagagcacacctgtgataccctaagtcccatcaaagccctcctctgctgcggaccagggccaacttgggcatctgatgtgtgaaccacaatgccagaactcacaagacttttaggggcctgtgggaacgttttaacttcttttattttattttaataaaaatatgaaaaagatgttttcttcctaacatgaacagtcctactgcagaacttcttttattttattttattgagacagggtctcactttgtcacccaggctggagtgcagtggcatgatctcggctcactgcaacctctgccacctgggctcaagcaatcctccttcctcagcccccaagtagctgggattacagacgtgtaccaccacccccagctaattttttgtagagactgggtttcaccatgttgcccaagctggtctcaaactcctgagctcagtagatccacccacctcagcctcccgtggtgctagaattacaggtataatccacgatgcctggcctattttattattattcttttcagacagggtttcactctgttgccaggatggagtacagtgggacaatcattactcactgcaacctcgaactccccagctcaaacaaacctcccatctgggcctcccaattagctgggacaactcctgggctcaagtgatcctcccgcttcagcctcccaaagagctaggagtagacacatgagcaacaatgactggcaaaagccaaagtcttcctgttggtcctcaaggccctcaaggtctgacctgtcacccgttcaccctgcttcagccacactgagctccttgtggctcctggaattctgcacactctcctgctcgaaggcttttatgcctgttattctctccccacctggatctctcttccttcaaatagccacacggctccctccctcaggtcatatcttaaatgtcacctttatcgggaacaccttccctgaaacgtccctgccaaaattgcgaaccaccacctgccaccaactctgacatgtctgtcaagtgtcacccatgatcacactgggtcctcataacagtcccaggaaaggacactgaggctcagacaaaggtcacttgctcaaggacacacaatgaggggagttgtgacaggaggtcataagcctagggacctgctgacccagagtccacacagctcaccatgacacttcaaatttgtcacaggagcaggaaaggggattgaaatggggtctcacctcattttcgatggttaaagcaggggaccaggatcttctggggatgggctgtggtgcgcgggcctggggcttccagcgaggcacctgggctactgaataggtgctgaagcccagggcgggcagtgaggctgagaacagcagctccggagggtgcgcctggctgtctgagctgggaaatattaccacctcggataaaggaggagggaaactgagtcaagagtacccatggaaagctatacatgcatggagacaaaaaactcaaggaaggaaaagagtcctgagatggggaaaggaaatggaggtgtgtgtggtggggggacagtcagattccaaggaaatgattgcagagaagattcaccaggtggaaaaaaaaacccaccgggagggtggagagaccatggagtcgggggagtgaaggaggaagtaggggaagaaacccttgaggcaggttctcgggggaggaagaggtttgggggaggacgttttctggaatgaaggagatgtccataaacagcaataaattttcctggggaagcggggtattaaaatggaggaccagccaggcacggtggctcatgcctataatccagcaggcggagtttgaagtgagccaagatcgcgccactgcactccagcctgggtgacagagcgagactccgtctcaaaaaaaaaaaaaaaagggaggaccactcacaggaggcatatgttcccaaggggagactgatattaaggggcagagggagaagatacaagaggggggaagagatatgcatgagtgggaggtattcatggaagcaggcgatatccatgggggcgatgaggaaatgcccactgggggaggagtcccagcgggggaatattcgttgtttgggctcacatcgctgggcactgtcctgccattggggtccttcacaacgaaaacgccttcgctgaccggcagccgtaccatccaattcaccttccgccccaggggattataaacgatgacctggaactggggaggcgggggtcagagagggcatgggtcacagcaggccttctccaaacccacccactttgcacagaaacacccctggctggtcctagtgtggtcacggcacttaaggccaagccccctcgagatgcgttgttctctctgctgacccagcttcgcagcccacgtaatttcactcctgtatagtcctccaaaaacattttccaactaccccctctaaagcccatctgccctagatccacccctcccgtcccggctcacgcgcgccgccgtctggctgagcgggcagatgctgatgtttagctgttggcaaaaggtgaagtgatctttgaagcctctgagccgcgccagcgcgttgctcagaagaacctgcggaagagcgcaaagggaccggtgggttcaggacgccaggcctgactcctcccctctcctcaggccccgccccgttccggtctctgtcccgcctccctcaagagtcgccccaaaaccccttctagccccaccctgctgcccttgactataccccatagctgtctccgcctcctcttgcccacgccccgcctccttcccccctccaaagccccgccccgttcctgtatctttccccgcctcctacaagccccgcccccacgagcccttgtagccccgccacagggctctcggctacgcctcacacctgtctctgtcccctttcccaggccctggccccgccccttcctgtctccacccccgtgtctcccaagtctcgccccgcgcacctcgcaaggcccccagcctgccgcaagctggcgcgcgtagtcgttggccacgtgctggcgggaggtgccgctgacggcgtcgtgatgctggagcacagccatcgcctcatctgctcatagacaatgagtccggtgaggttctgtgggactcagctgagaccccaaggggaagcgaaaggtccggtgctggcgggcaggattcttagaggctttaagaaggaactcgaggacggctgggggcggtggctcacgcctgtaatcccagcactttgagagaccgaggcgggcggatcacgaggtcagatcgagaccatcctggctaacatggtgaaaccccgtctctactaaaaatacaaaaaattagccgggcgtggtggtgggcgcctgtagtcccagctactcgggaggctgagtcaggagaatggcgtgaacacgggaggtggagcttgcagtgagccgagatcgcaccactgcactccagcctgggagacaaatcgagactccgtctcaaaaaaaaaaaaaaaaaaaaaaaaaaagaagaaactcgaggggggcggcctaggggtggtttccaacttcagccgcaaacctcttcccctcttgggcccgacacttactgaggggtgcactgtctccggagccatagggtcccacgttggccgccaggcccaccagcgcctccagctggttgcacacctggaggcagaggggtatgttggggcgcccagcctgtcgggcctcggggctgcatgccccctctagcccggctcctacccacctgcaggaagttgtagctgaggcgctcgtagcgtttgagggccggccgactggaaaagtaaccggtccagaactggtgggggccatccgcgtaagggaagaagtcgtcatgtttcactgacctacagcggcaggggcattgagggcagggtcatgacccacggggcatgccaacccccccaagctccccagtttccccaaataccaggtgaggttggccttgttcagctcccagaggtaacaagcgggggtggagtagagaacatggacactgcttccttttgcctgctgctgggggaggcgacggagtgagccctcgggagtccgcaccttcctgggggcccacacttccacacatgtgtgcacattcatgcatcccataggttcagtttctctaaatacatatttggcgtgcaagccaatggttgggtgtgaaaatgaattttggctgaagtcaaacatgaccactagccttttttaaaaggatttcagagatgcaagaataaacctgaaattttactaaacttttacaataattccaactttattattaaaaacttttgtggaaaaactaagtgtgacattatagggcaggaataatcgttttgcaggactgtcagattgttaccaaaaaacacaactttttttttttgggacggagtcttactttgttgcccaggctgtagtgcagtggctcaatctcagctcactgcaagctccacctcttgggttcacgccattctccagcctcagcctcatgagtacctgggactacaggtgcccgccaccacacccggctaattttttgcattttttagtagagacggagtttcaccgtgttagccaggatggtctcgatctcctgacctcatgatccgcccgcctcagcctcccaaagtgctgggattacaggcatgagccaccgtgcccggcctagacacaatttttataatgaatggaggtgcactttcacctgagcaaggtggaggaacaagaaagtgacctatgtgaggaaaaggatgtttgttttgcacgagctgtgtcccccaatgtacacagtaggtgctcaataaacttttttttttttttttttttttgagactgagtctgactctgtcgcccaagctggagtgcagtggcacgatctcagctggctgcaaactccgcctcccaggttccagcgattctcctgcctcagcctgccgagtagctggtcttacagatgagtgccatcacgcccacctaatttgtagtatttttagtagagacaaggtttcaccatgttggccaggctggtctccaactcctgtcttcaagtgatccgcccacctcagattacaatcccaacactttgggaggccaaggcggacggatcacctgaggtcaggagttttgagaccagcctggccaacatagtgaaaccctgcctctactaaaaatacaaaaattagccagggttggtggcacatgcctgtagtcccagctacttgggaggctgaggcaggagaatcactagaacccaggaggcagaggttgccatgaggcaagatcatgccactgcactccagcctgggtgacaaagcaagactcttgtctcaataaataaataaataaataaaattttaaaaagaaaaaataaataaaaataaatgacataaaagagctgttttggtgaaatagcagtgctgggagcgagtggaaggtgggaatggagattgcaccgtagtgaggacaagattgatgggaaggggtgtctgagatgggagaggggagacaagtttctgtgctgatgagagtgactgactgtgcacacagccacagccacaggccacttagtgcaaaacactaacacatctgtgttgggtaaaatgataactgcccaaaagtgtccatgtcctgatccccagaacctattaccacattagattacatggcaaaaggggaattaaggttgcagatggaattgaggttgttcatcagccaaacttaaagtagggaaattaggccacacagtggctcacatctgtaatcccagcaccttgggaggccgagcggggtggatcacgaggtcaagaaatcgagaccatcctggccaacatggtgaaaccctgtctactaaaaatacaaaaattagctgggcgtggtggcacgcgactgtagtcccagctacttgggaggctgagacagaagaatcacttgaacccaggaggcggaggttgcagtgagccgagagcacgccactgcactccagcctgggcgacagagcgagactccgtctctaagtaaataaataaaatgtggaagagagaggcagaagaggtgagaatgagagaaagggatgtgattacagaaacagggtcagaaagatgctatgtggctggctttgaagatggagccaagaatagattttgaatgtgggtaacttctagatgttggaaaaagcaaggaaattatattctctcctagagactgcagaaggaacacagccttgccaacaccttgattatagcctggtgagactcaggctggattttttttttttttttttttttttgagacagagtctttctctgtggcccaggctggagtgcagtggtacaatctccgctcactgcaacctccgcctcccggattcaagagattcccctgcctcaggctcccgagtagctgggattacaggcacgcaccatcacacccagctaatttctgtatttttagtagagacagcgtttcaccatgttggtcaggctggtctcgaattcctgacctcgtgatctgcccggctcagcctcccaacatgctgggattacaggcatgagccattgcgcccggcctcatgctggacttcttacctacagaactgtaagacaatgtatttctgttgttttgagctgctaagtgtgtggtcatttgttatagaatgaccacaatagaacaatagaaaacaaagacagcactgagagctatgcacataacccaaggcccccggatgcaagcgcacatgtgcacaagggtaccacagggtaggcgcactgacctgcgcatttaccagccggatgagcttgtcaaggttcttgaaccacatgttggcattctcatattggaagtccgagcccatggtcatcacagtgtggttggtgcggtaataccggccctgcaggcaagaggggagtcctgaagccagaggatcctgggccatccctgtgtatagctgtgttttgatgtatatggggtcaaggatgttgggtgcacaggcatgggtgggggtatggcacttgggagcgtggggacacagataaaagtagccaccagttgttgagcagttctcttggacccactacctagaagagggcatccagtcaccatgccatgctatctcttgcccagcctatgctatctcttctaatgaggaatgcacataaatccaggagggggacattgtgatggtgaatagaatagcatcttcctccagggggcatgagaacatgattacaggggctcacacctgtaatcccagctactcaggagactgaggcaggaggatcgcttgagtctaggagtttaagaccaacctgggccacacagcaagaccctgtctcaagaaaaaaaaaaaaaattaatctaaaacaattttttttttgagacagagtttcactctgctgcccaagctagagtgaagtgacgtgatctcggctcactgcaacctccacctgccaggttcaagcgactctcttgccttagcctcccaagtagctgggattacaggcgtgcgccaccacacccgactaatttttgtatttttagtagagacagggtttcgtcattttggctatgctggtcttgaactcctgacttcagatgatctgcccatctcggcctctcaaaatgctgggattataggcgtgagccaccatgcccagccatcaatttttaaagaaaggaaaaaaaaatttttttaaggagaacgtgttatgccaggcatggtggctcacacctatatcctagcactttgggaggccaaggcaggaggatcacttgagttcaggagtttgagaccagcctgggccacatggtgagaccttatctctgtgaaaaaataatgttttttaattataaaaatgttaaaggctggacgcggtggctcacgcctgtaatcccagcactttgagaggccaaggctgtgggtcaaaaggttaggagttcgagaccagcctggccaatatggtgaaaccccctttctactaaaaagacataaaacttagccgagcatggtggtgggcacctgtaatcccagctactcgggaggctgaggcagaagaatcgcttggacccagtaggtggaggttgcagtgagccgagatcgtgccactgcactccagcctgggcgacagagtgagtctaaaaaaaataaaaaaggaattctcaataaaaatgttaaaaatagactaggcacagtggcccacacctgtaatcccagcactttgggaggttgaggcgggcagatcacctgaggtcaagaccagcctggtcaacatgacgaaaccctgtctactaaaaatacaaaaattagctgggtgtggtggcaggtgcctctaatcccagcttcttaggaggctgaggcaggagaatcgcttgaacccgggaggcggaggttgcagtgagctgagatcatgccactgcactccagcctgggtgacagagcaagactctgtctcaaaaaaaaaaaaataataataaataaataaaaatgttaaaaatagaggccaggtgcggtggctcatgcctgtaatcccggcactttgggaggccgaggcaagcagatcacttgagctcaggagtttgagaccagcctggacaacatgatgagaccccagtgcaaaaatacaaaaattagctggatgtgcttgtttgaacccaggaggcagaggttgcagtgagccgagatcgcaccactgcactccagcctgggtgacagagtaagactgtctcaaaaaaattaaaaataaggagaacgtgttaggggatgcctgtaccatggaaagagctcattgtattgtatataccggactcgaaggttctggacaccagggttacctgggcagtggccacatttaggaagtaatcgaccagctccttggcgttgtactcggggctgcgagggtcctccaccagcggctgatcgacacacagcacatcccagcacagattccttggcgggttgtaaccattgggaagcacacctgcaggtcacaccaagttcaaggggtggcccatcacccagaccttccctggtttcaaagccggccatgtcccacccaggatgggcttcagaatttgtgtcccaatgcaaaaggaaatgcagggcctttgttcccagactataggaattccaggacagtgacaacagagcagatatcaagcccagggcccttctgagtgtgtggcaccatggctggccctgccctcaccaagccccctaccagtgaagaggtccgcggtcgggggcttcaggctggtgctggcccgccacacctgctccatctccagcttctgcatccgtacccacttatcttgataatcaaggcgcccaaagaagaagccgtcgaagcccatctggggatgagggaggaaaaggcagtgtgaattagtgcccagccctctcaccaccaaactcccctctgcttgggaggggcaggtcagagcacaggttaaaaagcagtgctaggtcgatgtggtggctcttgcctatgatcccagccttctgggaggccaaaacaggaggatcacttaaacccaggagtttttgagaccagcctgcacaacacgggcagactgtctacaaaaaatttaaaaattagccaggcgtagtggtgcgctcttgtagtctcatctactaggggggctgagacaggagaatcgcttgaatccgggagattgaggctatagtgagttaggattgcaccactgcactccagcctggatgacagcaagaccctgtctcaaaaaacaaaaacaaaaacacgtagggctgaaacagagaggcctccagcttatttccaagcttggggaagtttcagaactcaccaccttgggctagcagggagagggcgggtccaacatcagaacccaggttcacctccccagcactgtcaaagcgcagagcaggcctgactccaggaatgaggttcccccttccacagcctgaggatggatggggtctgagcacaggtaatgaacctgtttttaaggcagcctaggcatccacttgccacccggtttagggaggagccaggacccgagctagtgggtggggccagaacaccaagaggggcctattaggggagagggcggagccagccggagctgggtcagcctgggctgggcatagccggctgaggccagagctcaaaagccactggctttacggctcactcaaggggcagggcttcaacaggcctaggcctgggcctggtccttgtgagattgcagggagagggcggggtttgactgggcgagggaggagccagagtgagtgaagaagtgggcccaagagaggtcccgggtcgcacctgcgcaaacagcgaggcctgctcccgagagtggccgaaggggtcaatgtgccaggccacacggggtcgcccatcattgccaaatgtgtcctccagaaagcgcagcccaagtgtcatctggtccacgatggcaccgtagtgggtggctgcctcatcgttcatcacccagccaccattggcgaactccaggcgccctgtgccaggacaggcaaggtcagggtcagcggtcagagccaggagtgggagtagggtgggtgatactgggaatgtgaaagcctgcctgtgtacacatttctggcggaaggacaagaggggtcgctcccaggccatagttcccagatatgggaaagaggccccctgcatggcaggcttcccagaggatgcacagcaggtggggctttgtgggatgtataggaggtctccaaatggagagtccaggcaggcggagcgacacgcatgttatacagcttgcacgtggcatgacaaatctcagaaaccagagatgcagaagcagaagctgggctgggcttcctcttttcacttccttggggtaggctcaccctggcgcacaaggtctcgcacgacttcctgtgtggcatttgtctgctggtgccaccaacgggagaagaaggcaatctccacgtaaatgaagcgacgggtgggatctgccagcaaggcagagatgaccgagtccaggatgtactgcacaccggcgtgctggatgtcattcttgactgtggataacagggataaggctctcagggaacagcagagccaagggggttattcctagacagaggagcccaaaccctggatattagggtagcactggccccaccctaatgtccaggacccagagggattacagggaccatggggatcccagggaccagtccccatcctctactcacttccataaaagtactggtccacggttttgagccagcccacgtcatcatgtgtgtgaggcagcaggtgcacgttcagcatgttcggctgcactgtggggcatgtctgcacagggaccccaaacacacataccttgtcaataacccccgaggtcgggggctgcagagtaagtcttgatctagaggtgagtgactcagagaggcctgatctcgcctatgtgcagaggaggccaggccctcccaggcaggacacacacatacatagttgtgctcatagatacaactccactttgcacaaccccacagggcagctctcattcacactccgggaaaataataatagaagtagctgatgtttgttcagcatttgccgacagcagacggccaccgtgggaggtggggtgatgttatccccagtttccagatgaaggcactgaggcttagagaggataggtgacttgcccaacgtcacacactcaggaagtgtaagagctaggctggaatttcaggcagactccagagtcccagctctcagccagcacctccccccacacatacactgctcaccccctgccacctcctgcccctccaatcccacagttaagtgcagacaaagtctaggcaagcatcccggagacacggaggcaggtacaatcagacacagtcctatactcagatgcgcacagccagacctcgcaatgacacaaagcacgcactcagaccacactgtcatatcatcagccattcactagacacccacaggacagacccacccacacctctagactgtattctgggtttcactctgcctcctgtacgtttcagctcggaggccccactcacctcgtatcccccggcccgagcaccggcagccgccagcaacaaaaggaaaaagcagagaggcgggagcggtggccgcagggcgcgggacatggtccaggggcctgctgagtccaggcagccgcgagcgcagacccccgaagcccgcgcgtaggcgcccatggctcagcagcttcctcctggggttccccggccctggaaaggccgggcaaacgccccgcccccagacccggccgggccaatcggggtggggggcggggccagggcgcggtctggaggctcacgggagagaggctgtagccctgggcaatcccgggggtcgttacaggaaggtaggaaaatgccaccctcagggcactggttgggctaaaggtgacactggcgtctcacgggctatgaagacggaatgcctcttaatgccggaattccaagacggaatgcctcttaatgccggtaggagcagaagtgcttttcctaagggggccgggttttcctagccggtgtagtgtgtccatgggaatccagggtgtccgtcccatggaccttcagcgctagggtcctggaaggacctagcttgcctaagaggaggatctgatgaagagtcctatactgtggggattgggacgttgggtaaatacccctggagtaccagggatgggatccagcctggttgagaaggatccctgggtgttccggagagaaaagagggtctgacaagtggggaaggaccccgagtctttcatgcctttcccaattcctaccagttcattctctgataagaaaacaaagcccagggcaggcgcagtggctcaagcctgcaatcccagcactttgggagggccaggctggtgaatcacttgggcctgggagtttgagaccagcctgggcaacatgggttgttttgtagagacgggtttgaaaacacaaaatttgtaattttacacaaaatgtaaaaatacaaaaattagctgggcatggtggcacatgcctgtaatcccagctacttgggagactgaggcaggagaatcacttgaacctgggaggcggaggttgcagtgagccgagatcaagatcatgccattgccctccagcctgggcaacaagagcaaaactctgtctcaaaaaaaacaagaattaactgggcatggtagcacgcatttgtggtcccagttacgtggcaggctgaggtgggaggattgcttgagcccaggagtttgaggctgcagtgaacatagattgtgccactgcactcagcctgcatgacagatcaagaccattttctttcttaaaaaggaaaaaaaaaaaaggaaaccaaagcctagattatctaggtcagcagggccatctggtgagttgccagagggcagaagtcactgtcttgtccctagcacctgacttaagacacaaggtttatgaagtaagcaaatgaacagccagaagcctccagactggggccccacaccaggcctatggggctagagcccttcccgccaggtaggaggaacaccccactgaacagaagaggctgacagccagagtgaaaaactttattaacaacaggtttcaacgagaaagcaaatgaatacccctagaaacatggacagcatctcccccagcagcaggcaggggaagggaggcaggaggggtaagcctagggtgttccctaggaaagggccaggttccctctatccagctgggggcaccgagacggcctcattcagggaagtccaggatggcagctgaaggcagcaggtttagcagccaaagcccaggcctagtggatagacagggtccaaaatgtgacccttctaggctggtatcaccatgggggcgtcatgggctgaggattctgcagataggacatcaccacggcagagatggacagcctgagacaggagagaggtgtcagtctaggatggccaggctggggtccccccaccccttactcaagagtcacttgttctgtagggcaagtctcacatgaagctactcatcatttgcttcgtgtcctccgagctccgagagttggcaaagctgatgaaggagcagtagacagcgacccaagcacaccacttcagctagggaaaggtaagtgggtgggcaggttagtgaaaggcacaacaatgagtccccgaagccacctttccagacaccagatcatgcccactgattccatctgatgcagctgggaccttgccccacccggaattcctcagtcccacctgctcatggcatactctagatacgtggtttctagtcctactgtctggcctgcgtctctcaggaccaagagagactctgacatcccacatgcttaagaccctgccctttttccacaactcctctccaagttgcttcaaagcctggccccactcgcagaccaatctgccacatccccaacctgactcgaatccttgacttcaccaaagactggggctttctcggcccagcgtcatcgcagccccactcccggccgatctcaggtcccgccccatcagcaatgacaagacaccccgcttcattccaaacccgcccccgggcctcgttctcaggtccaactacacccatagaagctcaaccccgcccaccttaagcatgaggccgcacatgctgaagatcatgcccagcaggttcatgtagtccggcgtcgggtcgtccaaggccgggttacattcgctcggcgggggcttgtacctgcgacaggctcgagggtcaggggcgctcaggtcctgcccccgggatagacaggcgcttcccagggccccgatccacacccacaacccgaacccgtgcccacgacgctggggtcctcacctcagcactttgttcggcctccgtgggtccgacatattgttagtggacatagcgagtcgaaggccagatcacgcctcttccgctgcaggaatcgcagcttccggcgtgcaagctgagggcggattttagagtaacacccgaggccctcgcatttccgttcctcatgacagaggcttggactccccttacccagagaacggagatttaggagaagccagaagtcttcctttcaaagggaaaatggggaaaagaacctgaaagcgggcttcaatagttccaacccgatcaccgaaatgccaaaatgatgaacccggaagtgataaacaggaagtaggtcaggaagaacaataataaggttacacccaagcgtgggtttctaaggcgcggaattttccgtacagaccgatttaaggctgcaaggaaggagtcctgggagcatggctttccctgagccaaagccgcggcctccagagctgccgcagaaacggttgaagacgctggactgcgggcagggggcagtgcgagccgtacgatttaatggtgagcgccttcgtcttcattccgggtcctcctcccgcctcctgagatcgacggcccagtaacccccgcctggtgttccccagtggatggcaattactgcctgacgtgcggcagtgacaagacgctgaagctgtggaacccgcttcgggggacgctgctgcggacgtacagcggccacggctacgaggtgctggatgcggccgggtgagccggggaccaggctgggatgggagcgctgaggctgggatccgaggtcgatgctgatcctcctcctcctttactccagctcctttgacaacagtagtctctgctccggcggcggggacaaggcggtggttctgtgggatgtggcatcagggcaggtcgtgcgcaaattccggggccacgcaggggtgagtgaaagcctggagaccctcatttgagtggaggggacccgtattagcgcataggtggtgacacggccacccccattacaccgtaaggatcccttccccagatgacgatcccccactccgcatgccaggctaggcagtcaccaacccctgtccttgctgttcccccaaaacctttcacctccccttcgcccttgctttaaccgacactgggaaccctgcctttatcccagtcctccaaagtccagcctcctctgagtggcaataactttctcagaaggtgaacacggtgcagtttaatgaagaggccacagttatcctgtccggtgagtctggggcctaagcacgggggcccagggtgctgccctccccctccaaacctgacctcaccatcatgctggcctcacaggctctattgattccagtatccgctgttgggattgccgctcacggaggcctgagccagtgcagacgctggatgaggccagagatggcgtgtccagtgtgaaggtgtcagaccacgagatcctggcagggtgagtggagccaggacctggtctcaccccaggtgctacggggaatcatagctgcccccatgctcagattaaaacctactctcagctgggcacagtggcacacagctgtaatcccagctacttgggaggctgaagtggaaggatcacttgagtccaagagttcgaggcaccattgcactccatgctgggtgaaagacagactgtctacaaaataataataatctggccgggcacggtggctcacacctgtaatcccagcactttgggaggccaaggtgggcagatcacttgaggtcaggaggttgagatcagcctggccaacatggtgaaaccccgtctctactaaaaatgcaaaaattagccaggtgtggtgacgggagcctgtaatcccagccactcgggaggcggaggcaggagaatcgcctgaacccgggagttggaggttgcagtgagccgagattgtgccactgcactccagcctgggcgacaaagtgagactccatctcaaaaaaaaaaagataaaatgatttctaaaaataaataaaaataggccgggcgctgtggctcatgcctgtaatcccagcactttgggaggcagaggcaggcggatcatgaggtcaggagatcgagatcattctggctaacacggtgaaaccccgtctctactaaaaatacaaaaaattagccgggcatagtggcaggcgcctgtagtcccagctactcaggaggctgaggcaggagaatggagtgaacccaggaggcagagcttgctgtgagccgacatcgcaccactacactcctgggcgatagagcaagactccgtctcaaaataagtaaataaattaaataaataaatacataaaaataatcataaggaagaatttttgttttttttgagacgcagtctcgctctgttgccaggctggagtgcagtgacgtgatctcggctcactgcaacctctaacttctaggttcaggcgattctcctgcctcagcctccctagtagctgggactacagtcgcgtgccaccacgcccagctaatttttgtatttttagtagagacggggtttcgccatgttggccaggagggtctccatctcttgacctcgtgatccacctgccctggcctcccaaagagctggaatcacaggcgtgagccaccgcgcctggtggaaaaaatatattttctattcattaagtggaagtgaagagatcgtcataaagatcttcgtgttgagaaagcagaggaggaggaagaggagggattgatcttggtgtctcacagctgatagaggcagaagaaaatccacatataagtggacgcgttcagttcaaaccgtgttgttcatgggtcaactgtactttgaaaagtgctccctctggtggctgtggggggtgcagggagaccagaacagtctagatgctggtgctgggtagtggggaaagtggtgggactgagtactgaggaggaggagctggagaatgcaggaaaagggggaattgggccaggtggggtggctcacacctgtaatcccagcactttgggaggctgaggtgggcggatcacctgaggttgggagttcgagaccagcctgaccaacatggagaaaccccgtctctactaaaaatacaaaattagcagggcgtggtggtgcatgcctgtattcccatctactcgggaggctgaggaaggagaatctcttgaacccgggaggcagaggttccggtgagccaagatcatgccattgcactccagcctgagcaacaagagcaaaactctgtctcaaacaaaaggaagaaaagggggaatcagaaggactccaagggcttggaaagggggtgtgggtcttggaaatgatggagtaggacgtaattggccctgggcctgagtctcaaggccagagcttcagaattccactcctgtgcactggaagagcaggcccactgggctgggaaggcacagggctgcctggagccatgtgagtgtagtcaaggttcccgctggatctaccctctcctgcagctccgtggatggccgcgtgagacgctatgacctaaggatggggcagctcttctcagactacgtgggcagtgagtgtggctggggatgtgggacaggcagggaagatggggggccaaccaggggcaccccaccctcactcacctacccacccttcccccaaggccccatcacctgcacctgcttcagccgggatgggcagtgcaccctggtgtccagcctggactccacattgcggctcctggacaaagacacaggggagctgctgggcgagtgagtccttgtggtcgtggggatccccttccctcctctcccacccctggagaggaccaagccccccgatcctgtccacccttaggtacaagggccataagaaccaggaatacaagctggactgctgcctgagcgagcgtgacacacatgtggtcagctgttctgaggacgggaaggtgttcttctgggacctggtggaggtgaggtgcccccagccctacttcatacctagatgcctgccccatctcagccctgtccttacctcagtcactccagggcctgaaggctaggatcttttttttttttttttttttttttttgagacaagtcttgctctgtcgcccaggctagagtgcagtggcgcaatcttggctcactgtaaactccgcctcccaagttcaagcgattctcctgcctcagtctcctgagtagttgggattataggtgcgtgccaccacacccagctaatttttgtatttttagtagagacagggtttcactatgttggtcaggctggtcttaaactcctgacctcatgatccacccacctcagccttcccaagtgctaggattacaggcgtaagccaccacacccggcccttttttctttttttgagactattgcccaggcaaatgcagtggcgccatctcagctcactgcaacctcttccccccagggttcaggtgattctcatgtctcagcctcctgagtagctgggattacaggcccctaccaccatacctggctaatttttgtatttttagtagagacagggtttcaccatgttggccaggctggtctcaaactcctgacctcaagtgattcacccgcctcggcctcccaaagtgctgggattacaggcctgagacaccgtgcccagcttgggctagagagaagatgaggcaggaagggcattccaggcaaagggaacagcatatgttaagaggtgtagcctgcgcatgcatcagtcaggaaacaaaggcttcagggtggcggcaggtgcggcaagatccggggtcaggctgggctgcagatgccaggccgagcaactggcactgacccctgggcaagggggagccgacggccatgtctaaccttgggtgagatagggctgcagtcattcaagaaactggagctacatcttagcatccctgtgcatggtttcaagccctgagccctgtccttgacatgtcccagcctggtggggagtcaggccagaaacagaccatcctggtgtagtggggtcagagccgggggaatctcggcaaaggagacatcagcgctgggcttggccaggggaactaaggcccataagaggatggagggaaccgggggggccctgaagacttggcggacaagctcttgctttaggaactaaggtagcaagaatgttccacctatttcttatgggcccagtagaacagaagttgccttggagggcaggcacatcaagggacattttcaaggtggaaagaggaagcatggcttgcttgaggaactgtttacattgtgttgggaccaggggaagtggggatcattggggctgccaaatggacaggatggagcccagctggtggcagggaacaggcaagctgtgagcaaggcatgctccaaacatggtagtggcagaaaatcagcagtctctggacatggtctagaagcagagccaagaggaataactgatagaggaacatgtggtacaagaaaaagactcccggccaggcatggtggttcacacctgtaatcccagcactttgggaggccgaggggggtggatcacgaggtcaggagatagagatcatcctggccaacatggtgaaaccccatctgtactaaaaatacaaaaattagctgggcatggtagcgcgtgcctgtaatcccacctactcgggaggctgaggcaggagaatcgcttgaactagggagtcggaggttgcagtgagcccagatggcgccactgcactccagcctggcgacagagcaagactccatctcaaaaaaaaacagaaaaagaaaaagactcccaaagccaggcatggtggctcacacctgtagtcctagcactttgggaggccaaggcaggaggatcacttgaggccaggagttcgagaccagcctgggcaacatggtaagaccccatctctgctattttaaaaaataaaaaatcaataagaggctcccaagacttgcggcctgaacacctggtaggacagagctactgaggggctcagtctgaggtagattaattttgcagtgtctaggaggcaattagaggcaggtggctgaaggtcggggagaggtgactgagggcttcaggcaggactgagatggggggtgcccagggacctcagaaaccagggtacagcccagccacagataaccactccctacccctcgctccacagggtgcgctggctctggccctgcctgtgggttccggtgtggtgcagtcgctggcctaccacccaacagagccctgcctgctgaccgccatgggaggcagcgtccagtgctggcgagaggaggcctatgaggcagaggatggagcaggctgaagccaggggacccaccaacaggaccaaggaccgagacacagacatggaaggacttcagataccatcttattctagagacgtagctgaccaaaaagtaggggaggggctgggtctgcaaattaataaatagaagagggggtaagaccttcctgggaccgcagccgctcagtcctcgttcttctcatgcatgaaggcatccatcttctgggcaaaggtttcagccacaagcagggggaagaccagggaggcgtcagcatagacctgggtaggggggaacctgggtaagccatgggacccacactcatcgtcccagagaccctatgccccacccagccagcgcttaccttgacgggctgtgcatccacccggatcttgccccaggagacagcctcgtctggtcgggcacctgagtcagagccatcaaactcctgggctgtgttgatgtaaacagcgtagtcggccccgttccgctgtggggaggcgggggcacggtgggcccagtcagccagtcacaggagacagacacagagggaggacaccgtagccaaacaggctgagaggtgtgtcccagatgaaggaagcccttcacagacattcgctcccagacagggcccatgtcaatgtctggggtcactagagctgctgggcaacgatggctgtgtttccccagacccaacagccaggtgtcaacaaccctgccccatctgcaaggcaggagctgccagcaactctatcttcagaagccctccaaatccaaccaccgcctgcctcctgatccctgcatggtcaccactgtcctggactggagttctcactcacctgccaccatctgttcaccacatggccaccagggggagcatgggaacccgagtcaagtcctctcccacttctctcagtgcaaaagccaaagccccgcctcagcccacagggcccagcaggctccctgtggcacctccctgcatcacctcctggccctcaccactccaccttcccctcaccaggtacccagctgttcctggattacttcaggcgccccagagcctttgcaatggctgttccctctcctgggaactttgcaatccagaagctcaatgctagtacagcagcacaaactcctggcacgggagacaaccacatagctcctgggagatgcctccccaaacccctgctcccagctcacacttccagaagcctccttccaaaacctcttgttggacagcacccctttctcttctcatgccatcatttagtattccccgtagcaatgactgccccctgacgtggatgtcacttgtttgctatctcccctactagaacatcagtcccggggagcagggatcctggcctgtctagttcatgctgtctacccagcacatggcataggcccaccacacagcatgtctgcagagtgggccgaagcgccacccccactcaccatgaggttggcattggcaatgtggtgcttgaccacgcccccgcccagaatgatcatcccagtgcacttggcaaagatggcctgtgtgttgatgagcctcaggtctgggggaagagcgccgaagtcaggccttggactcagccagccctccttcccctctcctctgtggccctagcgcctcaccctcaacgatgtccaggaccaggcccgggttcttgtaggaatggaagaagatcatgtcgcccagcgagccgtctgtaagtgcgggactaaacacagggatgtggttctgcagagaacatgacaggacagtggctggagctcagagcctcgtctccatgctggctatatgactatctgactgtggatggggtgcctaatttctctaggactgtttcctcaattataagcataacagaaacacctctcacagatgaggcctatatgagaaaacccacagaaaacacttagtatagtgcctggcacataaagaaccagcctattcttagcttgctgagctgtttctctctctttttttttattccctgagacggagtttcactcgttgcccaggctggagtgcaatggcactatctcagctcactgcaacctctgcctcctgggttccagtgattctcctgcttcagcctcccgagtagctaggattacaggcgcatgccactatgcccagctaattttgcattttgtttttttagtagagacagggttccaccatgttggccaggctggtcttgaactcctgacttcaggtgatccacccgcctcagcccccaaagtactgggattacaagcatgagccaccgtgcccggccgtctaattcttttttaaagagccagcttgtggccgggcgcggtggctcacgcttgtaatcccagcactttgggaggccgaggcgggtggatcacctgaggtcaggagctcgacaccagcctgaccaacatggagaaaccctgcctctactaaaaatacaaaattagccaggggtggtggcacatgcctataatcccagctacttgggaacttgatgctgaggcaggagaattgcttgaacccaggaggtagaggttgctgtgagccaagattgcgccattggactctggcctgggtaacaagagcaaaactccgtctcaaaaaaaaaaaaagagccagcttgtgcaacatggtgagttcccatctctacaaaaacaattagccaggcatggtggcacgcacctgtagtcccagctactcagcaggctgaggcaggagaatcgactgagcccagaagctcaagacagcagtgagccattattgtgccattgcactccagcctgggaaacagaatgagaccctgtctcgtaaaaaagaaagagtaagtaggctgggtgtggtggctcacccctgtaatcccagcactttgggaggccaaggcgggtggatcacttgaggtcaggagttcaagaccagcctggccaacatggtgaaaccccatctgtagaaaaatacaaaaattggccgggcatgatggtgggtgcctatagtcccagctactcaggagggtgaggcgggagaatcacttgaacctgggaggtggagggtgcagtgagctgaaatcacaccattacactccagcctgggcgacagagcaagactctgtctcaaaaaaaaaaaaaaaaaaaaaaagactatgtagctttttttttttttttttcaggttctgattctctaattaaagggagtgggtagctcttattttatagcatctgggagtgtgggaccctgagccaggccccaggagagttgctaagtgttgcctctactgttccagagatagtctgggaggagcataaggatgctgaggccccactagttatctgtgtgacttcagacaaaattacctagcctggctgggcacagtggctcacgcctgtaatcccagcactttgggaggccaaggtgggaggactgcctgacgccaggagttcaagaccagcctgggaaacacagggagacccccatctctacaaaaaatttttaaaattagctgggcatgatggcatgtgcctgtggtcccagctactcgagaggctgaggtgggaggactgcttggccccaggaggttgaggctgcaatgagctgtgatcacaccactgcactccagcctaggtgacagagcaagatcctgtctcaaaaaaaaaaaaaattaccacgcctatctgtgtttgagtctcctcatctaagagtgaggatgctgagaataacagtactgaatccccaggaggctggaaagatgaaataagttaacacatgccaaagtctggctactttgctcccgcttaggtcctcaccttctgggcccagtaatacacggactctgggttgttgatctccttgcccagccgggcgatcatcttagaaggcgtccactttacaccctaggagaggatgtgaccttcaggccatgcctcccctgactcccactgaactggcccctccaggttgccccagccccacctctgtgttctgctccatcaccatctggtccagaatgggcatcagccagtcctcaaacttgcagtaattctcattgggcaccagcaggtttccgatcctgagaacaggaggcatgtaggcatcaggccccaggacccttggtccagctcccctgcccaacaccactcagggttctcacctattgatcccgttctcccggagctccttccccctgaggctaaactcgcccaagtatgtgggcgccaggcacttgatgaggtcttcctccacgccgccagctgtggtcaccaatacgtccacctgcagccacaaggcagtgaatttggcccaagaaggaagcccctgccctcattctgggcagaacttctaacctcatccttgtccagtgactcttatgagggagctctgctacaaaacaaaacttgattctattcctctgcttataacagacccctatctgcccatctcacttaaacgatcaataactgcattgcccattgacccagaggccaaggccacggcctcaccaggtccccaccatgttgtgctgcacaaggtagcgaatggtctcacggatgcctgaactgatgaggttggatgtatatcccaggaaaatggtgcagctggtaagtgggcggcggctctgggtcaggtccgcgtgctggtcttcatcctgtgacagtggttccagcttcttctcgatctgtgagtaagggccaagtcaagttaagcactggccttaaatcccagactcaggactccaggtgggctccagaaacagatttcaccccaggccctgcacattcagggatacaggaccagttctacaggggaccaaggaacatctcctgtgtaaactctgccccttcccagaccagatctcaagacacacgttcaggatttgcccccacccttttttttttttttttggacggagtttcactcttgttacccaggctagagtgcaatggcgcgatctcggctcactgcaagctccacctcccgggttcaagcgattctcctgcctcagcctcccgagtagctgggactacaggcgcgcaccaccatgcccggctaattttttgcattttagtagagacggggtttctccatgttggtcaggctggtctcgaactcccgacctcaggtgatccgcccgcctcggcctcccaaaatgctgagattacaggcatgagccaccgtgcccggcctttttttttttttttttttgagacagagtatcgctctgtcaccaggctggagtgcagtggcgcaatctcagctcactgcaacctccacctcgcgggttcaagcgattctcctgcctcagcctcccgagtagctgggactacaggcgcgcaacaccatgcccggctaattttttgcattttagtagagacagggtttcaccatgttggccaggcttgtctcgaactcctcttctcttgatccacccgcctcggcttcccaaaatgctgggattataggcatgcgccaccgcgcccagccagcccccacccttttaggaatcagagagcatctcctttcagatccggtcccttccccgctgggaaaagcaaatctaaattcaagaaccgcccagacttaggctcctcctcccatatcctcccttaatttgtcttgccccaggctccgcccattccagaaagctttaaatgtacctagaacccgcccccacaccaagaatcagtcctcgcctcctcaggttaccgtaccagcatgtaactaccagagtgcaaaatccccttcccaggacagaaactcccgcccagaataggtcccgccttcctccaactattgggcaactcaaataaaagacatatcccctccactggaaacgctgcccccgtctagtaccgcgttggttctacaagccacgcccctccgcgtccctagaaattccgcccggtcctcaccatggcattgacttgctgtacagcgcgcccgaagttggttgcttggaagccggtggtgccgaaggcctccagcagtgcgcggtaattcacaccgcggttgaagtcgtagccccggacctgggtgctttcgggcggcaacgtcgagctgtgctttagcacggcggccagcgcccccgctggcgcctcccgttccagggaaccttccatgcgcctatagccggctctcgagtcaaagctgcccctaggccgggcttacggcggcccagaaacgcgttaaaccccgacgcgcgcgtctccgcaagagcacaggaagtagggaacgtgctttgggcgaaagaccggaagttggtttatcacgtgaccatttttagcccctgtaaaccaggtcgccgccatttttgtgcgtgtgttccgtaatacggaagccgcgaggagcctttaggccctttctttctttttttttttttttttttttttgagacggagtctcgctctgtcacccaggctggagtgcagtggcgcgatctcagctcactgccagctccgctttccgggttcacgctgttctcctgcctcagcctcccgagtagctgggactacaggcgcccaccaccacgcccggctaatttttttgtatttttagtagagacggggtttcacctggtctcgatctcctgacctcgtgattcgcccgcctcggcctcccaaagtgctgggattacaggcgtgacccaccgcgcccggcgcctttaggccttttcttcctttttttttcttttttttttttttgatacagggtttcgctcttgttgcccaggctggagtgcaattgcccgatctcagctcaccacaacctccacattccgggttcaagcgattctcctgcctcagcctcccgagtagctgggactactggcatgcaccgccatgcccggctaattttgtatttttagtagaggcggggtttctccctgttggtcaggctggtctcgaacttccgacctcaggttatccgcccgcctcagcctcccaaagtgctgggattacaggcgtgagccactgcgcttcggcctttacttgttttcatgtgttctcgacttcccatgaatgaagattcttttttatttttattatttatttatttaatttatttttgagacaagagttacacgctcttgttacgcaggctggagtgcggtggtgcaatcttgactcattgcaacctctgcccccctggttcaagcgattctcctgcctcagcctcccgagttgctgggattacagacacccaccaccaggcctggctaattttttatttttagtagagatggcatttcaccatgttggcgaggctggttctgccctcaggtgaccgcccgcctgggctttccaaagtgctgagattacaggtgtgagccaccgtccccagccaaaattcctattttaatgccacctgctggagacccactgcttggcccggcactcgcccattcgtttctgttctgtcccctcgggaggggaggatggttttgttgttgttgttgctgttttgtttgtttgtttgtttgagctagagtcttgcgctgtctcccaggctggagtgcagtggcacgatctcggctcactgcaacctccgcctcccaggttcacgccattcttctgcctcagcctccccagtaactgggactacaggcgccggccaccacgcccggctaatattttgtatttttagtagagacggggtttcaccgtgttagccagggtagtctcgatctcctgacctcgtgatccgcccgcctcagcctcccaaagtgctgggattacaggcatgagccaccgcgcctggcctgctgctattttttgatagggtctcactctgtcgccaggctggagtgctgtgacgcgatctcggcccactgcaacctctgactcccggactcaggtcatcctcccaccccagcattccgactagtgtgcaccatcgtgcccagctaatttttttatgagggtcacttttttttttttttttttttttgagacagagtctcgctctgtcgcccaggctggagtgcagtggcgcaatctcggctcactgcaagctctgcctcccaggttcatgccattctcctgcctcagcctcccgagtaactgggactacaggtgcccgccaccacacccggctaattttttctgtttttagtagagatggggtttcaccgtgttagccaggatggtctcgatctcctgaactcgtgacccgcccgccttggcctcccaaagtgccaggattacaggcgtgagccactgcgcccggccgagggtcacttcttaagcgtcacccatggacaagatttcggtcaccaggcagagttagacacagtttcatccttcctcagccacttttgtctaatgggatagtgagcccggttcgtgccctcacaagtctccaaagccttcacatgctgcataacgctctgttcttccttcccttatagctgcagctgtcacctccacctcctctgggaagccttccctgaactcccactgggtcagtggcctcttctgggacccagggctgacgtctctttccctcctgcaagaatgtgagaccctgggtgtcatctgtatctcaaacacaccctcctaacagtgcatacggccaacaggattattcactcactctacaattcatgtagtctattctctatggtgggctccgtgctaggcactaaggatttagtggtgaacaagaccaagatgtggaccctgccctactggagcccacaatctgattgggaagatagaaagttaacaatagtggtgagtgctatcaggccttttttgttttttgttttttttggagacagagtttcgctcttgttgcccaggctggagtgcaatggcgcgatctccactcatcgcaacctctgcctcccagtttcaagcaattctcctgcctcagcctcccgagtagctgggattacaggcatgagccatcacgcccggctaattcttgtatttttagtagagatggggtttcactatgttggtcaggctagtctcgaactcctgacctcaggtgatctgcctgcctcggcctcccaaagtgctgggattacaggtgtgagccaccgcgcccagcgcaatcaggatttaaacaggataatttgagtctttaggtggaggagttcgggattttagttggagggatgggtgaaggacgccaaggaggtgagatttgagccaaagccagaaggctgagaaaatccccgtatgtgaagatgcagagaggccatttcctgcacatgggaagacagaacagcaaaagccgtgaggctggaatgagcctaccttgttggaggagacagacatcctccttgacatcctcgcttggacctcaaagttgccccctcagctccctctccacctatccctgatctttctgcatctcagcaaacggccccaccctccactcatccactagactgaaaaatagggattggggctgggcgcggtggctcacacctgtaatcccagcactttgggatgccaaggagggcagatcacctgaggttaggagttagagaccagcctggacaacatggcgaaaccccgtctctactaaaaaatacaaaaattagccgggtgtggtggcgcacacccataatcccagctactcaggaggctgaggcaggagaatcacttgaacccgggaggtggaggttgcagtgagctgagatggtgccactgcactccagcctgggcaacagagcgaaactccgtctcaaaaatagataaataaaaattaaaaatgaggagcgcagcttgctgtctccccttttctcacaccccacatccatccttctcagcatgtctgccaacctctacctataaagtaggtccgaaatccaggtgttttctttatccccatagcctgcaagctggctttggtatcctccaacccatctcccacctaacagctaaaatcagagagcttttttttttttttttttttttttgagacggagtcttgctctgtcgcccaggctggagtgtagtggtgtgatttcggctcactacaagctccacctcccgggttcacgccagtctcctgcctcagcctcccaagtagctgggactacaggcgcccgccacacgcccagctaattttttgtatttttagtagagacggggtttcaccatgttagccaggatggtcttgatctcctgacctcgtgatccgcccacctcagcctcccaaagtgctgggattacaggcatgagccaccgtgcccagccgctgagcttttttttttgatgcagggtctcactctgtcaccagggctggagtgcagtgggacaatcacacctcactgcagcttcgacctcctggcctcaagtgatcctcccacttcagcctccccagtagctgggactacaggtgcatgccacagctctttaaccataaatcaaacatgtcactgttaaaacctcctaatggtagcttccccctgggagtaaaatccaagcttttcacagtggccttaaagggcacctctcaacctccctgctgccatctcccaccatgctggccctccctccctctctcctctccagctacacagacctctttgctattcctggaacccaccaagctcttttttgtccaaggagtcaggtacttgccgctccttctgcctagaacaccccatttctcagttccttctcctcctttgggcctaagttcaaatgtcacctcctctgagaggcctgccctgaccactcctctcccctttactttgattttattcttctttcatatgccctttcacatgtatactctttcactgagtacattttctgttgtccatccctgcctaactagaaaggcagctccatgagggcaaggttttgtcttgtttcattgctaatttgggtttttgcacagtgctgggcacatattagaatctcggggcagggctcagtggcttatgcctataattcctttggaaggccaaggcaagaggatcgtttgaggccaggagttcaagaccagcctgggcaacatagtaagaaccatctctacaaaaagttaaaaacataaattagcagggcacggtggctcacgcctataattctagctaatcaggaggctgagttgagaggatcacttgagcccaggagtttgaagttacagtgagctatgattgtaccactgcactccagcctggacgacagagcgagaacctgggcttaaaaaaagaaaagaaggccaggcacgatggctcacacctgtaatcccagcactttgggaggccgaagcaggtggatcacttgaggtcaggagttcgagaccagcctggccaacatggtgaaaccccttctctactaaaaatacaaaaattagccaggtgtggccgggcgcagtggctcatgcctgtaatcccagcactttgggaggctgaggcaagtggatcacctgagatcaggagttcaagaccagcctgaccaacatggtgaaacctcatctctactaaaaatacaaaaaattagccgagcatggtggcacatgcctgtaatcccagctactcgagaggctgaggcagaagaatcgcttgaacccagaaggcggaggttgcagtgagccgaaatcacgctattgcactctagcctgggcaacaagagcgaaataccatctcaaaaaaaaaaaaaaaaaaaaaattagccgggtgtggtagcatacgcctgtaatcccagctactcaggaggctgaggcaggagaatcacttgagcccgggaggtggaggttgaaagtgagctgagatcgcaccactgcactccaacatgggtgatagagcaagactctctctcaaaaaaaaaaaaaaaaaaaaaaaaaagaacgaaggcattggagatttgagcctgagcagtggcgacaacaggaggagaggcaaggctgcatgttggagatggcagaggctgacaaagcagatgtgttgggaacagttagcaggagatccagcaggccagggggaggccagggcctcctcactcccccagccaaggcacctagcccacagggacccaggtgacacatgacaccagaggagccacagggcctcctggggcagggaccccctcagccgaggcagcagctgctgctgcagctggtgacatttcactccatgagagccctggcttcaaagtctttgcaggggtagccgagggagaaaagggggttgaagaggacaggctgggttggggagggagccacagcagggtggccaccagaggaccaggcagccagaggtgacttgggccggagcccttagccgaggtgtgtgggcctgatgggtccaggagcagccaccctcatcctgcagcccccaaggaacatagaaggaggtgtgggaaccctcgggcagccctaggctccccctaggggactgaggttgggcctgctgcccacggcctgcccactttacccagatgtccagcaaggtggccatcaacagtgacattgggcaggccctctgggcagtggagcagctccagatggaggcaggcatcgaccaagtgaaggtgagggtcggggccagtgcaggaggcgggaagaggtgggaacacatgggccaggggacaggtgcatgcctgggtctggtctggctgaaccagttggtctgcaggtgtccaaagatggccgccgatctgctgaagttctgcacggagcaggccaagaatgaccccttccttgtgggcatcccggccgccaccaactccttcaaggagaagaagccctatgccatcctatgaacccagggcaatgccaccctgtggcctgggcaaaccagggggcctcaataaacatgaagtgaatacttctcagggcatggctgagctgggctgagatgggagaccagagggactttgggcttgcaggggccaggtgcgtacctggcccagcctccctccctgcctgcccccggggtcacagccacagcagcacacacacaccctggagccccagacggagagcacgccatccctcttgccctcgccagcacccatgggatagcctgagcaggtaccctttcccaccgtgcagacaaatggccaggatttgagtcataatctatacaccacacgcgtcacacatcacacacacacgtgacatcatagacacagatgcccacgatcctcaggactctccctcttcaaatgcacagcaacagctgacatgcacccccagcccagacttgctatctctcccagtcactcccatgcaggcccgcagccccacagccccaagcaggcacaggcagaaccccagcaggcaaaccacactcacactccaggcccaagcaccaacatgtcaggtttatttctccttcgctctcaactgagagcggggcatccaaatcataacaaaaccagggcccaagagtgggaagcggccccctgggtgggcctgaaccccaatttcacccttcccccgggcatagggcccaggccaggacgctcacccgaatgtggctgggactccttgtgccctaggcccacggggcggaggcagcaccaacattggggatggtcccccaagaacagaggaggaagcccagcctccggcaggcagtatccacatccacgcccacctgctcaggcctgcagcctccagacctctagcgacaggtctccagagccggccaccaccaggttgccctcagcacagacctgggaagggggaggaacatgaggagtcagggacgatggcgctctggccagctgggcagggcacatggggcaggaccttaccctattgagcccattgtcatgccttcgggtgcaaatggtccttggtgggtctgtgggcacgtgcacctagtgaggggcaatgggcgaggtcaagaggtgtgcccctggctgatggaggtaggggagaggcagggactgtcctggggtgggggctgggcaggagcctcacccggatggtcttgtcagtggatgtggtgtacaaggctcccacggagtactggatcccagtgatgggaaagctgtggcccacatcaaaggactgcaggaggaggatcaggcaacactcagtcgaggctctcccaaggcccgccctcccccacaccaccaggggctcgggtaggaaggaagcccggggggagggacagtcaggggcaggagctccagcagacccggataagctggaagcagccgttgcggttggcgaagacgtgcagcaggccctggttgtcaccagcccagagctggggttcctggtaggacatgcagagcaggtaggagtccagctacgagagggacaagggacgggacagctcaggccgggctgggcctgcaacagtccccatccctccaggcccctggggagggcccacctgcagacgctgcaggacgctgttggctcggcggtccaccaccaccagggtgtggtcctcgctgcctgagatgatgtgccggtcatccgccagcagggtcagcacgggtctggagtgtagttgctggtgcttcaacagggctgggccggcttcatgggtgatgggccggtgaggagggatatcagagcccctcgaaggccccccccagcccatgagagcatcccgggtctccatcctgtctggcaaaaccctcgatctgctcattcccccaccccacagagtgacccatctctcctctcccgcctcaggtaaatccaggcttccacaggagccccaggcctctgcccatccccgtccacatcccatatccctcctccgatcccatctactgttcttagcacagagctgaccaaggtggtctcagtcttgcatccaccctcaggttggcctgaaacatgcctatcccgcagccccgctccagctctgcctggacaaggtacactggcccttcaattaacaaaagtagaatgaataaataggccaggcacagtggctcacacctgtaatctcagaattttgggaggctgatatgggcagatcatccgagcccaggagttcaagatcaccttgggcaacgtggcaagaccccgttctccatttaaaaaaaagaaaaatggccgggcgcggtggctcacatctgtaatccctgcactttgggaagctgaggtgggtggatcacctgaggtcaggagttcatgaccagcctggccaacatggtgaaaccttgtctctactgcctcagcctctggagtagctgggactacaggtaggcgccaccacatccagcataaaaaaacgtagttaatccaccactgttcctattatcatcttcccccattaaccccatggggctgctgtggtattattatctggatttcaaagatggggaaaccgaggttcaagcttgtctggaggtcacacagctaggcagtgggacagccagaactctaacccgcccccagggctgcccaagcttcaccttcacccgctgcccaagttgcctgtattgtaccagcacagcatggccactctgagtggtgagtatttggttaagtgactatgaccccagccaggctgtgaagccccagtgtctccttccctaacatgacatctcccaacctgggccccaggacccttggcccacctctggggtcgtagatggtcaccttcttgtcataggtgccagtcaccaggatgtcaggcaggtaggagaggcacagcacggctgagctggccctagggacacacagaccacagggctttggctgtggccagacagggtcctatccccgcaggccccctgcccaggcccccacacactttatctcgccgaactgctgcccatccgctgccatgtcccagagcttcactgtgctgtcccaggagccggagcacacgcggtggtcctgcgctgccagtgaccacacccagccctgcaggacaggagcagcagtcacacacctgccacagcccatgggggtcccagactgggatcgttctgtttttgcaggtaaggctcagagaggtcaagagactcacccaaagccacatagctcttcctccccagtgcccatggtgatagatgctgcagcaagtacaacacccaactctggctccaggtgatcacccccattgcatagatgaaaccagagcaagttcaagttgagtacagattaaagtttgtgtccatgggtcagcctgacttcagagtccaggaaaggcacaccccacccagaaactttttttttttggagacggagtttcacttttgtcatccaggctggagtgcagtggcttgatcttggctcactgcaacctctgcctcccgtgttcaagtgattctcctgcctcagcctctctagtagctgggattacacgcttgtgccaccacgcccggctaatttttgtattattagtagagacggggtttcaccatgttggccacgctggtctcaaactcctgaccttaggtgatccgcccgcttcagcctcccaaagtgctgggattacaggcatgtgccactgtgcctggcccaggaactctttttttttttttgagacaaggtcttgctgtgtcatccaggcatgaatgcagtggtgcgatcatggcttattgcagcctccacatcccaggctcaagcaatccttgtaccacagcttcccaaagagctgggactacaggtgcatgccactacactctgctaattttttttttttttttttgagatggagttttgctcctgttgcccaggctggagtgcaatgatacgatctcggctcaccacaacctccgcctcccgagttcaagcaattctcctgcctcagcctccctagtagctgggattacaggcatgtgccaccgcgccagctaattttgtatttttagtagagccggggtttctccatgttggtcaggctggtctcgaactcctgacctcagatgatccgcctgccttagcctcccaaagtgctgggattacaggcgtgagccactgcatccggtcttttttttttttttgagacatagtatcgctctgtcgcccaggctggagtgcagtggcatgatctcggctcactgcaagctccgcctcccgggttcatgccattctcctgcctcggcctcccgagtcgctgggactacaggtgcccacgcaccacgcctggctaattatttggtattttttgtagagtcagggtctcccatgttgcccaggctggtctcgaactcctgggttcaagcaatcctcctgcctcggcctcccaaagtgttaggattacaggcctgagcaactaactgcaccctggcccaataacatttctaagtcaagttctgcaagaactcagcaccagtggtggtttgaagccacatgacaagtgattaagagtgtggcctctactttgtgacctggcaaaccatatcacctccctcagttcattcatcagcaaattgggcagaaaacatcccttgcctcaggagctaatatgcacagggtgctgaatgctgactttttgcccaccaatcccgctgaggagggcaatattgtgtatctcattttacaaatggggaaactgggccccagagaggttgagtttctcactcaaggtcacacagccaggaagcagcacagtgagaatttgaacccagcatcctggccccaagcccaagctctcagctaccggcctgaccaccttagcgactggtggagatgctcctccacagccacctctcacgagatgacagtcatgctcagagttggctgatctccaagggtagtctcataactgctttacactgggcctctcaaggtgtacctgacgtctattgagcacctactgtgtgtcaaagcctgagcttggctgggcaccgtggctcatgcctgtaatcctagcattttggaaggctgagtcaggcagatcacttgaggccaggagtttgagaccagcctggccaacatggcgaaacctcgtctctactaaaggaaaaaaaaaaaaaaaaaaaaaaaaaaaaatatatatatatatatatatatatatatatatacacacacacacacacacacacacacacacacacacacacacacacaaaagaaattagctgggcatggtggcacatgcctataattccagctactcaggaggcaaggttgcagtgagctgagattgtgccactgcactatagcctgagcaacagagtgagattccattaaaaaaaaaaaattagctgggcatggtggcaggcacctgtaatcccagttacttgggaggctgagacaggagaatcacttgaatcccggaggcagaggttgcagtgggccgagatcatgccattgcattccagcctgggtgacagagggagactctgtctcaataaaaatataaataaataaaggccaggtgactcatgcctgtaatcccagcactttgggaggctgaggcgggcagaccacgaggtctggagatcgagaccatcctgaccaacatggtgaaaccctgtctctaccaaaaataaaaaaattagctgggcatggtggtcctagctactcaggaggctgaggcaggagaattgcttaaacctgggaggcagaggttgcagtgagccgagattgcatcactacactccagcctagcaacagagtgagactccatctcaaaaaaaaaaaaaaaaaattagacaggtgtggtggcatgcacctgtagtcccagctactcaggaggctgaggcaggagaaccgcttgaacccgggaagcagaggttgcagtgagctgagatcatgccacactccagcctgggtgacagaacgagactccgtctcaaaaaaaaaaaaaaaaaaagcctgagcttaatgcatgtccacattaatgcataatgcatctccttcatcctcatcctaatcacccactggacagaagtagaaactgaggcacagagaagtcacacatctcactcaaagtcacaccaaggttagaaaagtcagattcaaatctatgcggtcctgtaccaaaacctggggccttaaccaagatgccctactcaggcctcatacctcctatccccacctgactcctcacctcatgggtactatttcgcttagtgcctaaggtcttgatcagaacctggttggactccgtccccagctgccgcaggtcccacaagttgacgttgcgatctcgggagcccgacagacagagtgacccaccctggaaagggagcaaggtgatgttgtcagggccaccctggcccaccctgcctggccccccacagaccccgtctcacctggagcagcagcactgagtcaacggaagccacgtggccttcggccaggcagaagtattcgacccagcgcccatcctctgcccagcgggacaggtgctgctccagcgcaatgcaggctgccggccagtcaaagttcttctctgtgggttaccacgagtagggtgcccagtgggcagggaccctagcacccatgccagctggccaagcccaaccctggcttccagggagcccacactacaccagacttggacagaaccccatggagatccctactcccaccccaagccgacccaggctgtggtcttgggaccacctgcctgcccatttcccaggcaggtctaggactactcactccaatttccagaaattgggaactggggtctcagaactacctctccaggcgccatcccccaacccaaactcagggcagagcagtctcaggatgttgaggtctgacctcaggctcagcatagaagctgggacctcatgactaacccttcctgcctcagccatctgaaccagaccaagggggctgtttctcaaacagtatctggaaaccagggagccttgtcaagatgcagaatgcaagccccagatgcagattctgtgatatggacggggtccaagcatctatgtttattaagctgtttgggagagtctgacctgggggttggatggcaacaccttgagaatcactgatcccggagtgatcctgattcctctctaagcagaatcaaagcttccaggttaagggtatcaaacacccaagctgtaatacatcttggcttaagggcctgaggatccagctgtatcaggatcaacaatatcgattcaaaggtcccaagctgtcttccctcaggaaccaatcaactcagggccaagagccactgtctcacccctaactgggtcaaggctctagggctcaggagttttgacatcaacaggtgctgtctcagcttctaagctggactcagaacctgaggatccttgggctcactttgagccccagcataaactccagagcctaagacttcaagtccctgtgtcaatccccaatcaggggtcagtggcttagtaccacaagaccccaagactgaggatatttggatcctgagtcgtccaggaaccacagccccatgttagggtttcacagcctcaggaccccaagtgcctgactgcctcgtggtccacccagaggtcctcaggggcttcggcaccaccagtaactaccttagcctccagcctgagccaggacagccacgaagcctgcaccagaggctgcatccggaacaccccatgtacctcttccccgccccaagcctgacctgggcgggcgcccccggcccccggtccccggcccccggccccgcgcaccttccaccactgggtagggcgcgcgtacgcggcgtagcgcgcgtagcctccaggtgacatggtcagacacgaggtcgcggagcgcgtggcacacccgcgacaggacgtggagcacgaggcgggcgtccaggtaggagcagatctcgagcagcagctccgggggaaggctcagaaggcccggctcacttacggccgaaaccctggacgcggcccgaggctccgaagcgctcggggacgcggcgggtgtggatagctgcgaggggcgcgagaacgccagcccggattttggcggactgagaacgcgggccacgtaggccttggcctgcgcgtctgggtctgtctctgactctgggtccgagtcatcgtcccaggtgcgggaatcatcgcaccgccctaggggaagctccattgcgaccgggtgggcgctgccggcctcgcgtcttgtctcctaggcagcacgagggcacttccggcgctgtctgatgacgtttatgcgcccaccggaagcgacgaagtcagacactggcttaatacagaacatcgccccgcttacagggtctcttgcaactgcgtcggccttaggctggaaaatgcaggttcctgtttctgcgctttttaaactagccgataccgagagccagccaactctagctaaaaacgaaactcaagccaggcggggtggcgcgcgcctgtagttccagatactcaggaaggtgaaggggtaggatcccttgagtccaggagttcgagactgcagtgagccatggttgtgccactgtactccaacctgcgcaacatagtgagaccctgtctctttaaattagacataaaataaacactgctttaacgaaggcatctgttatatgtgacactgagcttagaaacccaaaggcccctttccgagttcaaggagtagagattggaactcttgcctcttttcccagagccagaaatatgcagttacactgcagaggcatcagttaagtgactttttttttttttttttttttttttgagaaaggaactggggcctcagaactacctctccagaccccattccccaacccaaccttggaggacagcagttcagtcctccaagcggagtgcttggctcattgcaacctccgctttctggactcaagtgatcctccacctcggccccccaggtagctgggactacaggcgcgcaccaccacacccggctaatttttgtattcttttgtaaagacagggtttcactacgttgtccaggctggtctggaactcctgagctcaagccatccgcccccaacttggtctcccaaagtaccaggattacaggcgtgaaccatcgcgcctggtggaaagctacctttttcttttttctgagacggagtctcactctgtcacccaggctggtgtgcagtggcgcgatctcggctggctgcaacctccgcctcccgggttcaagcgattctcctgcctcagcctctagagtagctgggaatacaggcacgcgccaccactcctggctaatttttgtatttttcagtagagacggggtcgcactatgttggccaggctggtctcaaactcctgacctcgtgatccgcccgcctcagcctcccgaagtgatgggatgacaggcgtgagccactgcgcccggcctaacatcacacttactaaaacagcatgttggccgggtgcggtggctcaggcctgtaatcccaccacttcgagaggcaaggtgggttaatcacttgaggtcaggagttcaagaccagcctggccaacaaggtgaaaccccttcctactaaaaatacaaagaattggccgggtgtggtggcaggcacctgtaatctcagctgctcagaggctgaggcaggagaatcacttgagcctgggaggcggaggttgcagtgagccgagatggcatcattgcactccagcttgggcaacaagagcaaaactccgtctcaaacaaaaaaactgcaggtatttactgcaagcctcttttgagccaggcagctaaccaatccacgtaggtcatctgcgcagtccttgctgtttgctctacttgacactcttctctccatggctctgttcaaacatcgtcttctcagtgtggcctttgcaggtcaccctacataagatttcaaccgtttcccccaccattctctctgccttcctgtttttctctataggacttagcacagttccactttttatactctatcctctcactagaatgcaggacttatttgttgaatattggatgtgtgtcagtatttttaaattttcccacgttggtctttgggccacaccaaggttgcagtaagattttattttggctgggggcggtggcccacacctgtaatcccagcactttgggaggctaaagtaggtggattgcttgagcccaggagttcaagaccagcctcagcaacatagcgaaaaccccctctacaaaaaatacaaaaattagccagcatggtggcatgcacctgtagtcccagctacttgggtggctgaggtgggaggactggttgagccagggaggttgaggttgcactgagccatgattgcgccactgcactccagcctgggtgacggagcaagacccggtctcaaaaaaaagaaagattttattctgaagattgtggtttccccccacagctgaaactacttctcatttgcctgagtaattgtaactaatattaattaaattaccctcggcctggggctgggctgaaccttctatgaaaaccttgacccagggtcagctgatgataagagtgcggcaaggcctcaccccttaccactcagtttagagtacggcagaggggcatcttgaacctgggctgtgacactaatggctcacccttagtgagctgaagtcccagagaatgagctgcacatttcatatatgttacaaatttaatcttccatctttcacattcgtctatcttcccactctcaagtatccccggtgcccccgacatttcttcactaccaaagccaaggacacaggaagccacagactaaggagttcacaagaaactgatctttactcaacaaagttctacacaagtggaatctcacgccacctcggcgccaatccccagcacagcacagtaacaaatggacagacccgggagcccgcagggggaagagggtgaggagggaaagagggactgtggctcaaggccagtctgggtccacagccctgggtaggggagaaggttgagaagctgaaacttcattgtgcaaaaaacaaccaaaaataaattaaaaaattaaatagtttttttttaaaaaaaaaaaaaaaaaggaaaacgagaagaaccaggctccccttccctgaaggtgtttgtatccccccatcttgagtagcgaggggttaccaatcccatcagacagccaatccatccacacaccccaagacccagcagaggatgcttcaaagaactggaattaccagaaaattaaaaggtatttttaaaacttttttttttttttttaacaaatggcttccagagacctgctcgagtttcatggggtgggcgtgcagggacacccagctaatttatggaatgtgtactgagtgccccttggaatagatgcagggcctgaccctgactatggaaagacacagggcttggatggagggtctggcgcccaggagggatggatggagcaggccccaggatgcgagactccagtcagactccaaaacacaaggggctccccaaagaagtagaaagcagggaaggaaaaaaagggaaaaaatgctaagggggtctgcaaggcccagttttctggccaactgggaagtaactacacccccaccctctctaggggagccccttccaccttgaccatgttcccagactattccggaaggttctctagaattgctgacccagtctagtaggatctctgggctcactgggtactatgatgagcaggaagtcccagggagatggaatagggaacaggggacacaccacctttcccttccaccaagccttggttttcctttttgctggcaaaaacctgtgtcctctgtcatcatcaattaaacgcccctgccccaggccttgagttaaaactggggcctgaaacgtgagaagggggtttcagaagcacagagaaacggactgcccctgaagctgcttacagagagagatgctcggggtaggtgccagtagctctggctacacccagctctcttcaggaaaaaggtcccaacccagtgtcttcaaaagccactggagcacacaggaaggagaaacggtgacctctggccagccccagccactccagtggttctcaccctgcgagctaggctaggataaggacggagacaccaccagctgaggctgcaacaaagctggcagggagtgtgtggagtgggtcccaagcatgtgcgtgctgacagggcgactcccaaggtcaccatcctcctccccccgccccgagatcccgcctgaggccccccacccacccagccctccccagtcaccgccaattccggcaaaacagcagaagcttcttaaactctagatgcaggttacacggaaggccttacgggttaactcaggggttcactaattctactgtctccatgcagtcggggaaatggtggagcggctggcccagcctcgccggttatggcacccgcacatgcgtgtggccatgtgtgtccgtgtgagtgtacgcgtccctacgagggcccccctcctgacctgctcctccctcacctcatccgaagccggattcggtcagctgtgtaattcctccctcccacgtagctggcccaagtgggctgccagagatgaccctattagagcccaggggcccttgcccaccagaagtcccccccacctccccgtttgtaggatgagcatggtggccccacccacctgccaggagggcaagtggacggatggacggacggacggacggacggggaaggcatctggatttgagtcccactcactcctccctaacccccctcaaccagggcacagcgacttccggatgcagcgcactccccagtaatccctccgacgacgacgcagacagaaacctgcagggggaggaggaaggtcatggcctgggacctttcggcccccaagacagtgctgacttgccagctgcagtctccttacctggcagtctccatgatcacctagaccccatagaaagccgccagcctctccttgagcagcggcgggaattgctcagagaactgctgccagttatcttccccaacttggtctttgaagccgtggagaatctgtggggagggtggtggtgaggggtaggcaggggcagaacaaggggagtgcgcctcttcccccatccccaggccccattgttaccagatggtctcacccctgcctgctcccggaactagatcagggcccagacagagcctcaccttataaaacatgtcccgaaggtcatccttcgggctcacccaggaggctacagcatcgcagaagaaaataaagtcctgaaacgtgacggatcccaggtgaggggccgcccgagcccagcgcccgcgcctgccctcagagcccagctgccccaacctgcacaacgccccccgggttgacaccgatcatcatgcagatgccgcggaaggctgagtccttctcctcgttgtccctgatgttcctgagggacgtgcacctgtgggaaggtgagcagctggaggtcagagggcaggctgggcatgcatctgtggagggctgggtcactggggatcagtgagtgggcctgggacatgcatctgtgggggtggggcagggcagggagtcagtaggcagatggggctggaaatgcacaggcgagggagggggttgggccagtcccgcccaccacacagcaggcttgacacgtggacacacaccaaggccggatgaactgctgcagcatgggtgccacctcctgggggcacacgtagcccaagcggccgatggtgatggctggaatggcagagggactcgtcaggcgacctgcaaccccgagcggccccgggacggtacgtggcggggcctctggcacaaggcaccaagccccgccccatgagccccaagggaatggctactgcagccaccctggtcccccaagcttggcccagccaggggtcctcctcatcacacctgagtcacttcccaggtctctctgcatctatctttctttctttcctttccctttcctttttgtttttttttgttttgttttgtttttgagatggagtcttgctctgttgcccaggctggagtgcagtggcatgatcttggctcattgcaacctgcctcagcctcccgagtagctgggattgcaggcacgtgccattacccccggctaatttttgtattttttagtagagatggggtttcaccatgttggccaggctggtctcgaactcctgacttcaggtgatctgcctcccaaagtgctgagattacaggcatgagccactgcacccagcctgaggctgcatctttcttggggcttctcccagtgaccccttccaggtacttccagacaccctccttggttccttgacaaggctctttctgatgcccttcccagcccagaaccccacctccagaaggcaggcaggggtgcaggcagcagccgggccaggtgcccacctgtgttttccagcagtgtcttgggtgtgttgggtcggttaatgatttccaccaggttgttgaggaccatctgcacataaggctgcatctctgcccctgggggagcacccagtcagagccctgcacagcccccgccacccacaggggccagggggccgccccacctcactcactactcgccccagttccaactagagactggccaaccactaccagtgaggaaacaaaagaccttctccggctaatccccacccagaatccctggccaaccagggacagacccacaccctccaaacaacagaggcttctctggagtcgctaaggtgacaacacgctgcccaagtcaaaggaaaaaaaaagccaaagtcacccaaccaatccgaatgagtcttttagccaactacacaaaacggtccaatcagaacagccctcctatccctcctctttagagaagccaatcacaaatgacctttctgcttggctccacccctgacgacccccaagagacttgccttgaaggaagctgtcagtcagagctaggctcccgcccccaggttgagaacaggctaatggggggcgcgtgttgccacttgcagggcactcacccatctgcatgcagatttcaccaatggcccaggtggcgttgttgcagacggagatgaactctgggttcaggttggtgcccagaatgggcatgaactcggctggtggggagaaacaggggtgctgagaaggagggccagccagggtaagctgcaggacctagtccagcaggccccatcagacagtacgaatacatcccaatgtggtcacagtcatccccgggtattgctctccatcacttgaggccggggctggggtcatgggttagggacaaggcgagtgtcgtaccgatacagggcttgacatggatgaagcaggctttggtgaggtctcccaggagggcaaaggagctctgccggacctcaggcatcgagtcctggggattcaagtaagatcagtgtggctaggctcccctccttctaaccaggacagctcagggggcacagtccctggtgcatgtccagcctctgccactttccagttctagagctcctagctgttccttaacctccctagcctccagcccacatctgcaaatgggagatggcagtgccccaacggtcatccctcagtgtccgtgggggattctttccaggtccctgcagatataaaaatccacggatgtgcaagtccttgatataaagtggcacagtgttagggccaggcgcagtggttcatgcctgtaatctccagcactttggcaggccgaggcaggcagatcacttgaggtcaggagtttgagaccagcctggccaacatggcaaaaccctgtctttactaaaaatacaataaaattagccaggcatagtgggacacgcctgtagtcccagcttcttgagaggctaaggcaggagaactgcttgaaccctggaggtgaaggttgcagtgagccgagatcacaccattgcactccagcctgggtgacagagtgagactctgtctcaaaaaacaggtggggggcggtggggggggcatagtgtttgcatatgcacctatgcacattctcctgtacacttagcatcatctctaaatcacttatatctaatacaatgtcaacagtatgggaatagttgttatactgtattgtttagggaataataacaagaacaaacttctgtatgcgttcagtacagatgtaatttttcctctgagtattttcaatctgaggttacttgaatcttgggatgtagaacccacagatacagagagccaactgtgctggggcagggacttgggctttcacattttctattttcttttctttctttttttttgaagacagagtctcagtttattgcccaggctggagtgcagtggcatgatctcagctcactgcaacctctgcctcctgggttcaagcaattctcctgcctcagccttccaagtagctgggattacaggcgcctaccaccatgcctggctaatttttgtatttttcgtagagacaggatttcaccgtgttggccaagctgctctcaaactcctgacctcaagtgattcacctgccacagcctcccaaagtgctggattataggcgtgagcacctggcctcacattttctattttcaatactgtttgctttaaaaaaaatttttttttttaattttagaactggggtttcactatgttgcccaggctggtctcaaactcctgggctcaagcaatcctgcctcggcctccaggattactctttaaaataattagaacagcaccttttccctgatttcctttgggcacaaccaggccctgactccccaccaggggcagcccacgcaggctgctgggtgtcatcactgtccagggtccccacccacctgcatgcactggaacagcaatgtcatgatgttgctgcgggccaccagctgctccacgtgaccacccaggccctcggccaggccgctgagcagatccagtgctacgatcatgaagtccttgtcgggagcctcatactgctcagggtgctgggtgtacatctagacacagatgccgacaggggcacgggtaagtggagcaggcccgaggcaggccaatgcagaagcacaggtgacgggcctagggttgctcaccatggcctgagccagtgtcttctgcaccagggtgacacagcgctggtagacgggctcacagtaaggcaggaagccactctgcagggcggtggccaccgatgacagacactggcagggaggaaggcaggtggggagaactcaggcagggtgggcaggatgggtttcgggtgaggggcaggagcccactcacctccagcagggggaagaggtccttgtcttcgtccttgagctcattccacttctggatcagtgggggcatcagcttctggatgtattcctggagagggagcacgaaatgggcgctccctgggtcggggtggcagactgtgactcaggtacctgttgcccgagtgatgaggcctgagcgcctcaccgtggctcatgggaccctgaaaggcctgccatctggccagacctcgaggccttcattcttctcacctgtccaagcaccgcccgccccaccccaccccccgggagcctgggttaccacctcctggttcccgaagcacagcacttaccacgctgtctcataactgtctttctcccccactagactgggagcagggcgagggcggggccgggtctgtctgtctgcctgtcgaggtcacggccacgtccctggcgtgcaacacggggttgccaccaggtcactggatgcccaggggcacggggatcgggaggcgggagccgctctggggtctcaccggctggttgaggtggtggcctacagagtcggccagggtgccaatggcgtcatagaggatgagcaggttcttgtgctggtatttcccaaaggcaaagacaagggtgtccaggatgtagctgaggtagggcaccagctccgtgcaggcctcttcctccagggtggcaaaagcactggtgggagggaggatgaagcgggggctcagtggaccatggcaggtgacactgggccatgggcagttggggagggcaactcaggatcagccagtacgaatacgcgataaatcagttccacatcaacagtcacaggtgtcatcacttcccagagggtggccgggggagagtgggggctgtgggatcaggggtccagggtcacctgcaggccgcctcctgtaccctcttgttgccatccaggatgcgtttgagcagctctgtcatcaggggcttgaggtgcatgtcgggtggctggctgaccacccagtgggcatagcggctcagcgtccagcaggcgatggagcggaccaaggccttcttatccgacaggcactggatcaggtgcgggatcagctcaggcaggtagggcaccatgccctgcatgcagcctacaaggaaagggaaccaagagggggcagtttgattgggcccagccacacccaccgtatggagagaagagtcagccgcacacaacatatagggaaactgaggcttagagtttaaatcactggcccagactcatttcacagagccaggtaaaggcaggcacaggaggggaaacaacagaagcctctcatcccaaagccccgggttatctttatttttttttgaggcagagtctcgctctgtcgcccaggctggggcgcagtggtacgatcatggctcaccgcaaccttcacctcctggttcaaacaattctcctgcctcagcctcccaagtagctgggattacaggcctctgccacaatgcccggggaattttttatattttcagtagagacagggttttaccatgttgaccaagatggtctcagtctcctgacctcgtgatccacccgccctggcctcccaaagtgctgggattacaggcgtgagccaccgcgcccagccaaagagctccgtgttattgcgttaattcaattcatgcattaattcatgtgttaattgaattcatgtgttaattcaaaattggctccgttacatagtgagtggggttttatggggcagcagtgacccaaatggaataaaagcactttgcatttgaaacagttcttaagatgtttgtgagttttcttttttttttttttttttttttttttttgagatggagtcttgctctgttgcccaggctagagtgcagtggtgtgatctgggctcactgcagcctctgcctcccgggttcaagtgatttcctgcctaagcctcccaagtagctgggactgcaggcgcccgccaccatacccaactaatttttatatttttagtagagacggggttttaccatgttggctagactggtcttaaaatcccgacctcacgtgatcccacctcagcctcccagagtgctgcgattataggtgtctggccgtttatgattgttctatttctccttatttttgtttaattttttaatttattattattatttttttgagacggagtcttgctctgttgcccaagctgaagtacagttgcacaatcttggctcactgcaacctccgcctccctgattcaagcaattttcctgcctcaacctccccagtagctgggactacaggcgtgggccaccacgtgtggctaatttttcatatttttagcagagacgaagtttcaccgtgttagccaggctggtctcgaactcctgacctcagttgattcaaccgcctcggcctcccaaagtgctgggattacaggcgtgagccactgtgcccagccatttttaacaattttttaatgttttctttgagacagagtctcgctctgtcccccaaggaggagtgcagtggtgtgatctccactcactgcaacctctgcctcccaggttcaagtgattgtcgtgcctcagcctcccaatagctaggactacaggtatgcaccaccacacctggctaatttttgtatttttagcagagatggggttttgccatgttggccatgctggtcttgaacccctggcatcaggtgatccacccgccttggcctcccagagtgctgggattacaggcttaagccaccacacccagggtttttttttttttttaaaatatcacgaactctgctcttttatttaaagagaacaaagataatagcacattgccaataatccaagacacaagatctatgtttaccagtttgagctcaactcctatagatctttttaccataaacatgtaatacaggccgggtgcggtggctcacgcctgtaatcccagcactctgggaagctgaggcagatggatcacctgaggtcaggagttcgaaaccagcttgaccaacacagtgaaagaaaccccgtctctgctaaaaatacaaaaatcagccaggtgcggtggtggacacctgtaattccaactacttgggaggctgaggcaggagaatctctggaactcgggaggcagaggttgcagtgagtcaagattgcgccattgcactccagcctggacagtaagagcaaaactccgtctcaaaaaaaaagaaattagccaggcctggtggtgaattcctgcaatcccaagctactctggaggctgaggcaggagaattgcttgaacccgggaggcagaatgttgttgcagtgagccaagatcacaccactgcactccagcctgggcgataagagggagactccatctcaaaaaaaaaagaaaaaaaaaagaggccaggcgtggtggctggctgggcaaggtggctcacacccgtaatcccagcactttgggaggccaaggcaggcagatcatgaggtcaggagatagagaccatcctggccaacgtggtgaaaccctgtctctactaaaaatacaaaaaaattagctgggcgtggtggcatgcacctgtagtcccagctactcaggaggctgaggcaggagaatcacttgaacctggaaggcggaggttgcagtgagccaagatcatgccactgcaccccagcctggcgagaaagcaagactcagtctcaaataaataaataaataacacagcttatgtaatctattaacatatgtaagcgtattgtgtgatatataccctattaacatgagatatgagatacattaaacacatattacatgtcgaaacatttctttagacaatttttttttgagacagggtctcagtctgttctccatgctggaacgcagtggcgcaatcatggctcactgcagccttgacctctcacctcagcctcccagttagttgggactataggcacttaccaccacgccggctaattttatcaggttttttttttttttttttttggtagatatgaggtctcactatattgcccaggctggtcttgaacacctgggctcaaacgatctgcctgcctcagcctcccaaagtgctaggattacaggcatgagccaccacacctggcctttttaaaaaattttttgtagaaagagggtttccctatgttgcccaggctggtctcggactcctgggctaaagcagttgtcctgcttcagcctcctgagtagctgggattacaggcgtgcaccacagtaactagacaaattttagacaaattttgaaagcttacaaggttgagggtttttgctgccatgcctgaaatttttggcacaggtctggatgctgaggcaatggtatatgatgcctccaacggactcacaaagccctcctgtaacaagttttatgtcccaccgggaccatgggagcctgaaaaccccaccgattacagaacaccaggttgaatttgatgaaacaccacctaccacgggttactactgactctggcaggccagcccggcagccaggaacaggtttaaggcccagacacaccctgagtgactgtaaggaagtggcatcaatctttctgtacctcagtttccccatcttcgaaactgggatccggcacccagctcatcaggtggtggtgagggccaaggatgtttgtctacataagtgcacgaggcaagcatgcagctgtgcctgctgttattatcattgttgctgtaattatgcttacaacatgaaagaactacctgcctgcaagaatgaacaagaggccttgcactgtggggctccaggggttcctttcaggcccaggaaccaaggggagaattgagatctcagagctgtttggagtggggtgagtaggcctccagggagaactgaggcattggtgtggctagtaatgtgggccagccctacagtctcatgccagcacagggctcagagatcaggcgcactcaccctcagcaatggcgcccagcaccaggatgcccgactccttgaccacccactcggggtggaagaggaggcctttgagtagtgggagtaggtggggcagcagttcctcccggaagacattggcgaggacgtccagtgcagccgctgagcacttccctggggaagggggaacaatggggaggctcagggcggcccctcaggcaggtggccgaccctccttgactgcactcccaggatcagagatcatgctcagaatcttcacgatcagcttctttttttttgttttgtttttttgagacggagtctcactttttccgcccaggccggagtgcagtggcgctatctcggctcactgcaagctccgcctcctgggttcatgccgttttcctgcctcagcctcccgagtagctgggactacaggcgcccgacaccacgcccgactaattttttgtatttttagtagagacggggtttcactgtgttagccaggatggtgttgatctcctgacctcgtgatccgcccgcctcagccttccaaagtgctgggattacaggcgtaagccactgcgcccggccacgatcagcttctaatcagcttctgcctcagcttctagtcacctcccaagagggagtccagggcttgccaccccaccaccacccccaggcaggggcacacactcaaattccagtcggacagagcatcatcatcatcgtcatcctccgcgtcctcggagccatcaggccgctcagcctcgtggggcagtgtgaccgtgcgtgacttgtggaagcgtggcttgatgtcctgctcactgtcggggacagcctcatcctcctccacatccccctgggggacaggcagactgttaagtactttggggaccacagccgcgacacccacgcccatgcccacccatgctgggtgggccctgcctgaccttgagcaggatgatgtcaatttccgagtacttcatcccattcaccaagatggggatcaacctgcacagagagggactgtttatggggatgcaggggccgtggcaaaagttggggggaggcacagcttggggaggaggcaaacaggtgccaacagagtgaccagccccccaatcagccacagagcagaccctgcagagcatgatggtactgctaggtgcaaattgatccatttccctctggggaattatcggaatctagtctctgccgctatgattaggatataaatgataccactcctgcctccagagaaaggtttttttttttttttcttaagaagcagggtctaaccctgtgggcggcaagccacccaggcaccgaggcaagagacagaggacacgagctgttccagtataataaaatataaaacaagaatagttataccagatatagatcttagatatgattatatatgaatatcattaatcattagtttgtagcaattactttttattccaatattatgataatcctcgctctataatcatagcctaggaaaaaccaggccatacagagataggagctgaggggacatagtgaggtgtgaccagaagacaagagtgcgagccttctgttatgcccggacagggccaccagagggctccttggtctagcggtgacgccagcatctgggaagacgcccgttaccaggcggatcatggtccagcggtagcaaaaggtgtcaaggaacaacacccgctacttagcagaccaggaaagtgggggagtctccctttccccgggggagtttagagaagactctgctcctccacctcttgtggagggcctgacatcagtcaggtttgcccgcagttatccggaggcctaaccgtctccctgagatgctgtgcttcagtggtcacactcctagtctgccttcatgttccatcctgtacacctggctctgccttccagatagcagtagtaaattagtgaaaatactaatagtccctgatatgcagaaataatggcatacgctgtctttctctttgtctactctccctctctgcctcggctgccaggcagggaagggccccctgtccagtggacacgtgacccatgtgaccttacctatcattggaggtgactcacattctttaccctgccccttctgccttgtatgcaataaataacagcgcagccagacatttggggtcactaccggtctccgcgcattggtggtagtggtcccccgggcccagctgccttttctattatctctttgtcttgtgtctttatttctacactctctcatcgccgcacacaggaagagacccaccgaccctgtggggctggtccctacgtaaccctatcacccaggctggagtgcactggtgcgatcacagctcaccacagcctcatgctcctgggctcatgcaatcctcctgcctcagcctcccaaagtgctaggattataggcgtgagccatggcactcagcctgcaggaaagctcttgacccaggcctggccactcagtggattatagacccctgaatacactgaaaatcttggtacagtgcctggtccctagcacaacattaaggcagggacatgcggtcctattcctggccactttcctgagatagggcagagactagccagagtaggggagcaaacagactaggcagccagcccctcagctgcagcccagagttgtaagtgacagagccttcatcacctgctcatctaggtctcatcactccccaggagccgtctgcccagccctagactgttatcaataatttggggccgggcacaggggctcacacctgtcattatagcactttgggagaccaatgcaggaggattgcctgagcccataagtttgagaccaattgggacaatatagtgagacctcacctctaatgaatgataaataaataaataaataaataaataaataaataaacatacaatatgctgggcgtggtgactcacgcctgtaatcctagcactttgggaggccaaagtgggcagaacacaaggtcaggaagctgaggcaagagaatcgcttgaacccgaggggcggaggttgcagtgagccgagattgtgccactgccctccagcctgggcagcagagtgagactccgtctcaaaaacagaaatttcaaaataataataataatgatctgggggctgggtacagtggctcgcacctgtaatctcaacactttaggagaccaagacaggaggactgcttgaggccagggatccgagaccagccagagcaacttagcaagacctcatctctactaaaacttagaaaagattagctaggtgtggtgggatgtgcctgtaatcccagctacttgggaggctgaggtaggaggattgcttcagctgggaggtcaaggctgcagtgagccatgattttgacactccactccagcgtggatgacagagcaaaaccttgtctcaaaataaaaaagaaaaaaatgatttggagagaggcaagcaatccaagtttgtcaaggagggtcagttttaggacttttgttggaaacactggtcgaaaatttctttactctgaagttcctaagctggaagggcacagaaggctacagcactacccagagggaaggttgtgcctaagaatgaagccaacacaagggaagcagatctgagaccacaaagatgcctttcacatcctttgagctcctggatacagccatacccctgaagcctttgttgatttttcatttcttttttttttttttttgagacggagttttgctctgtcacccaggctggagtgcagtggcacgaccttggctcactacaacctcagcctcctgggttcaagcaattctcctgcctcaccctcccaagcagctgggactacaggcgcctgccaccacgcccagctatttttttatatttttagtagaaatggggtttcaccgtgttagccaggctggtctcgatcttctgaccttgtgatctgcccgcctcggcctcccaaagtgctaggattacaggtgtcagccaccacatgtggccattgatttttcatttctttccacctatcagttacctaattttgaagtcttcaaaaagtggcattcttaccacttacacataaatatatactgaatgtaaactgacaaggatgtggactgagagaagcacagcaggtgaccagaagggaaggcagaggcatagcaaggggtcgaagctggggtaggacagtgggcagcagcagcactcactggaccagatgggaggccaggacttccttgcagatgggctgctcggccagcgtcagccagaactcacaggcctcaagggcaacgttctcatcatggtcctgggtcctctgcagcatgtactgtggtaggggggagaagctgaggcctggcctggctgggggtggctccctgacccctgccaccggccccctgcctgcccgcctgggctggccttgaccatgcacacctggatgatgctgtgcatgtgggggatgagcctgtcaatccgcacttccagaagcatcaccagggcacggcacacattcttccgcacctcggggtcatcatccacagccagggcaaataggtgctgcagggaggaacagggtcagttgtaggggccctcagtcctcgccctgcccacccccagcccagcggcccacctcgatgaaggtgtcaatattgtccatcagcgcctgggcccggtccatgatgaactggttcacgcaggcgatggcgtgggacctggcggggagcagacacgtgggtcaccctgaccctgcccactccaggctccctggaagcccccagggagctgcacccaccggatcttgggactgcagtgcttgaagaactgcaggaacttggggatcatgatgttgaggggcctgttgagggcgtcactgtccagaagctctgatgagtcttcacagatcttctgcagggctccaaaggctccctgagtgcagaggggcagagagacaaacgtgggtggtgggtggtggtcccagccccccagtactcgctctggccatccatggcttcttgcctacctcacaagtgttgtaatcctccgagttaagcaggttgcagagctggggcagcagctcgggccacatctgcagctcacccttggaagcgatggtggtgatgagaatgcctggggcggccgggaaaggacgctgcctgaggctgggcaggggctgcctagcacctccccctcccactggacacccccagtgctgcctttctgttccctagcccatgtacgccctctacatcccccctccttttttttttctttgtaagagatagaattagctctgttgcccaggctggactgctgtggcacaatcaatagtccacagcagcctcaaactcctggcctcaagccatcttcctgcctcagcctcctaagtagctgggactgcaggcacatgccaccacgcccaactaatttttaaaattgtttgtagagatgggatctcactatgttgcccaggctggcctaaaactcctggcctcaagcaatcctcctgccttggcctccaaaagcactgagattacaggcgtgagccaccgctcctggccttgacataggtagaagggtactccttgactcagtaggcaccctgagccttactgtgagtcaactctgttccaggccctgaggcacagcacagagcaaaacacaaaatcctcacccttgggagctggaagcaagctatgaagtaaagataaattagcaaaaaaaactgggaggggccgtgcatgggtggctcatgcctgtaatcccagcactttgggggaccgaggtgggtggatcacttgaggtcaggagttcgaaaccagcctggccaacatggtgaaaccccatctctactaaaaatacaaaaattagctgggtgtggtggggggcaccagtaatcccagctacttgggaggccgaggcaggagaatcacttgaacctgggaggcagaggttgcagtgagcagagatcgcgccacagcactccagcctgggatggagcaagactccatttcaaaaacaaacaaaacaaaaacaaacaactgggaggggccacatgccaaggactaaggggggaaatacagcagaaaagatggtgagaaagggctgtaggtgaaggtagcaactttaaattgggtggccagagcaggcctcgttgaggtgacatcttgatatctgagccaaggcctgaaggaggtgaaggaggcgagggaggaatcatccaggtttctggggaaagggcatctgaggcaggggactctatggtgcaaaggcctggcgtaaggacaggcatgatgagagagggaaaggaggtaagggcaggaaggtggcagggatgcttgtactgcctattagatatccaggagttacatacagcaggcatctgaggtgccaggacagtgcacatatctggtgacagagctggatatgggttctgttaagtgcagagatggtatttgctgccatgagatggcagtgtttcccaagggtggaaactcaacgagagaaaggtgctccctgcaatgggtaggtacacagtgaggattgtggaactttagccacaccccctcattctgtgtgcctcagtgcttccagccctcagaagagataaagaaaaccagcctcctaactaaggttatcagtaggtttctttttctctctttttttttttttttttttttgagatggagtctcactctgtagtccaggctggagtgcagtggcacaatcttggctcactgcaacctccacctcccgagttcaggtaattcccctgcctcagcctctgaagcagctgggattacaggtgcccgctgccacactcagcaaatttttgtatttttagtagagatagagtttcaccatgttggccaggctggtctcgaactcctgacctcaggtgatccacctgcctcagcctcccaaggtgctgggattagaggcgtgagccactgtgctcagcctggatcagtaagtttcaatgacttagcaaagagcctggcacatagaatgagctcaggaagtccacatcctactactggcctgggagggggtttttgcaggactaaaagttactttttatttttgagatggaatctcagtctgttgcccaggatagagtacagtggcattatcttggcttactgcaacctctgcctcccgggctcaagcaattctcctgcctcagcctctcgagtagctgggattacaggtgcccaccagctgtaattcccaagtaattttttgtattttcagtagaaacggaatttcaccatgtaggccaggctagtctccaactcctgatctcaagtgatccgcctgccttggcctcccaaagtgctaggactataggcgtgagttaccacacccagccagaagtcattttttttgtttttattttatttagttttttttgagatggagtcttgctctgttgcccaggctggagtgtagtgccgcaatctcggctcactgcaacctctgcctcctgggttcaagcaattctcctgcctcagcctcctgagtagctgggattatagatgttcaccaccacgcccagctaatttttttttttttgagatggagtctcgttgtattgccaggctggagtgcagtggcgccatctcgcctcactgtaacctccaactcctgggttcaagtgattctcctgcctcagcctcccgagtagctgggaccacaggcgagtgccaccacgcccagctaattttttctatttttagtagagatggggtttcaccacattggccaggatggtcttgatttcctgaccttgtgatccgcccacctcagcctcccaaaatgctgggattacaggtgtgagccaccatgcctggccagctaagttttttgtattttaagtagagacggggtttcaccatgttggccaggctggtattgaactcaacctctggtgatttgcctaccctgacctcccaaagttgctgggattacaggcgtgagcctattcttagtcatctttctgtaacttcctcaggccaccttccaagagtcagaaaaggctctgctgaaaacctaattccgttgcacctgaaacatgaatacctgcattattttaactgctatacccttagcactcagcccaaggccgaacacaaaattctagatgttgcatgactgtctcagagccaagaaggactgtttcaggagggagtggttccagagcgtggccctgcactgcctcagctgtttctgacttctgctgcttacccagacaggtcccttaatagctcagcgcctcagcttcctcatctatcaaatggcaatagtaatagtactaccatagagggtgccagagcattccatgaagcactacacttaacatgctgagaagtgagagttcagtgtgtcctcagaggccaacccccgctgcccctctcaccaatggtggctcggatgagcgaggaggcatcgccaatgttgttgagacactcctgtttgatgaagtctgccacagggggtgggaagctctgatagtgtgccttcacgttgttcttgaggatgaggccactgagagagcgcgttggctcatctgggaggaggaaggctgaggttcaggggcccagggggagaaagcagggtcccgatcgcatggaagggagcagagggcgtaccttctgacttgagtctggtcaggacgaaaatcaggtagttgttgaagtcaggaaactgattgagttgtttgagtttctgccaggctgttaagggacttggaagacagaggccttcccccagccaggtcccctcattatgtacctgacactatctctgaccactgggaccaggctgccagctcctgggggatcccgctccctaataagcccacaatgacacagagcacctcagacacgtcaaattcatataaggggccgggcgcggtggctcacgcctgtaatcccagcactttttgggaggtcaaggcgggtggatcacaaggtcaggagttcgagactagcctggccagcgtggtgaaaccccatctctactaaacatacaaaaaaattatccgggcatgatgtgtgcgtgcctctattcccaactacttgggaggctgacgcaggggaatcgcttgaacccagcaggtgaaggttgcagtgagccgagattgcgcctctgcattccagtctgggcgacagagcaagactccatcttgaaaaaaaaaaaaatcatacaaggagttgggtggaaatgtctgagtttcccatccactcctgaagacccagccagagcaggagagggaaggagaatcccactcctcttaaagtggcagctactagtcagcgatccccactaacaggccatgaagactttttttttttttttaaaagagggaatccaaattttggggtgagtcatgctcatggtttaaatatttatttatttattttcagacagagtctcactctgtcacttaggctggagtgcagtggcacgatctccgctcactgcaacctccgcctcccaggttcaagcgattctcctgcctcagcctcccaattagctgagattacaggcttctgccaccacacctggcttaatttttgtatttttagtagagacagggtttctccatgttggccaggctggtctcaaaactcctgacctcaggtgatccgtccgcctcggcctcccaaagtgctgggattgcaggcgtgaaccaccgcgcctggcctatatatcttttctttgagacagggtctggctctgtcgcccagggtggctggagtacagtggcacaatctcagctcaccacaacctctacctcctgggctctagccatcctcccacctcatcctcccaagtagctgggactacatgtgcatgccaccacacctagctattttttgtattttttgtagagatggggtctccctatgttgcccaggctggtctcaaactcctgggcccaagcgatctacctgcttcggcctaccaaagtgctccgattacaggcatgagccaccccgttgggccagggcctactttaatagttaatggagtagatgctagcgttcgatgaacattaggaattttcatcattttctataacaatccccgcagctctggaaatgggacccaggaattgtaatccttctctgtccagggcagatcctccgcacagcagaaaaaatctggggactaggggagtcagtccctctctttctctctctggcctttggaaactgcacgcatctacccggctcccccagccccggaaggaaggaaggatacatcctgcacgatgcgctgagtggctgtgttgggcgactgtgagtctttgagcagctgcaggacctgctgcaggccctgctcgtctggctgccagtccatggcgcaaggcaagctgcggaggtaggggccggggtcagcgctgggtctctggggctccgtgtgagacccaggtggagcccctgaggccgcggtggccgcatgacgacgggaacgccctcggcggacaggcggaggcctccgatccacgcccgcccaagtgcggggtccccgccagctgcgccatcctcggccgcgcagtcgcgggctcgggagcgcgggaggggggatgtggaaacgggccacaggcggcggcggcggggcccggcggatcctcatgggacccagcgaagagccctcgtcccagggtggcccatgccgctgaccccggctccgagcccgaaggcttccacctccctcgcagcggctgggcgagggcccagccgcctccacatccaggggccccgccccagaccgtgatagcgccccggcccccgtggtctcttctatgcaggcacagtccctgaagagtccccttcccccgacactctgcccttaacttctgccagatcccagaggcctcctgccctagtccaatttctgagcttccccagatgcgccctcccaagacgatcgtcctgatctctcctgtcccctgttcctgcccttcaagctcagtggatgccagatatccccctctgtggcctagccaaattctaaggattccccttaatcaggcccaaagcagtccccaggtaggtctctgctgcctcttcgaatgagagccagccaagcccggccaacccactataggagccccctggaccgatcccagtcgccttccccaatcaggtctggccaagcctctccctgaaattccctccgaccctgtcagcagtaacccctgctgacggatctctgttgcctctcccagtcaagttcggccgagccccccaccacctcgtgtcagtaaccccctggtccgatccttgcagcctcccccagttcggcctgggtaaacaccccccggggcattcccctcaacggatcccagcaacgcctcgaagtcagatccaagaaaaccctctaggccgaagtctgacgcccctccctgtcaggacccaacgagctcccctccccccaccccgctcaacttttcagtgcggcctcccccaatcagacccaaccaagccccaccgaaacaggcccctacacacacccgatcctcgcgacgtcccccaatcaggccccaagcagtccccagacgcttcccccaatcagatcccctccagcccgaccccagcagtcccactggccctcttcttgaggagccccgacatggcctggctccgaggccccaccccctaagctctgctcggttcccccctcccccgcccggcccgttctagctgccaggaggatcgggcccaaccggcttcccggcctttcccggtcgggcgcggccccgacgcccgggccgcgcgcggcgcaggctcggtgcccggcgggggtcgacgcaagccggggccaagagggtcgggctctgagtgaggcccacttacccggccccgggcagcagcggcggcaactcgcgctgcggcttctccagagactcgcgcggaaggagggagccaaagagagagaattaaaaaaaaaaaaaaaaaaaaaaaagaaagaaagaaaaaaaaaaaagaaaaacgcggccgtaggtgagccgccgcggctcccgtactccgttcaaactggtcccgccgagccaatcggaaggttcaaccttcacacgtgccctggcacttgggaaacccgggctgagacaaggtccggtcacgtgaccaaagagttgccgtttctttggcctctctagccagccggtcctcccagtgtctcgttttcccagcatctttcactgacctgaccgcaagctctttagctggagccaggagtttggtagcgcgtggggactttgtgtgtgatggatccaggaacccctcggccagagccagcaccctccttgtcaccttcctccactaaaaattgaaatgtgcctcccttcccccatccagaggtacttgggaggagtacgctgtgtgtgcgcaaggaaagagctgagcgtgctctttataccccagagacaaaggaaagaaagcaggacaaagtaagtgcctgagacaagccgggttcctacagaagcctctgccactttttgcattattttccagtactgtttgatagtttttacaaggagatgaaaaagccacaaggatataaatttttgaataaaacgaaatgaactaataaaataaactttgaaccacgcctaatccctttccctacctgaagttgaatgaggtggaacagcgcaggaaattctggcaagggcagggtcatgaagaaagaaatcttcttgatccttgcgacgtctgaagacagtagggcaccgtttttccttctcttgagagaggagcagatggtaaaaagctggagaccctgtagcgtcttggtttcccctccctgccctgccgataacaaagtgggagacctcctgccacttgaagcctcagtttccccacttgtcaaatgggtataagagcagttcgcgcgattagagatcatccaagttaagcatgacctggccagctctgaattgttccttaaaaacgtggctttaccctccaaggctcaaggctgttcttttactgtattcagcccctccctaagccgatatttaatgaattcaccagctctaatcccaaagaacaacccaccctgccctgaggaactttttgaccctcgagagaggcagaggtcaatttttgcccctgcctgaaggaggggaacagctatctcaacccacttgccgtaggcaaagtcagtcccggctccgttcattcatgaaaatcaagtcccgggcctccaaggttagggaagtgtcggcaggcgcctaactccactcggagaatcgcggaagacaccctaaaggagcagttgggattccgaggtagccagttccgctggactgaaacctgggctgagaaacacgtgcagaaagccgccaccaaggcatgcgtaaaggcctccctctcccccaccctccgataagccctggaactacaaatcccgtcctgccatgcgccagggtcgccgcgctttggggttttggctgagactcaaattggcaggagggtctctagaccaaccgaggtgcatggggagcagaagagtgagactggggagctggggctggatttgggggttcctggagcgagtgtgaacgataagagctttctggtcaaatttgggggctgccccagataaagatcagatggggagcgagtttgggatgcaggagacaatttgttaaggttcacccccttcatataatatggcaaattttcagcggccctccgcaagccttggggcagaacaaagtagcccctgctgcatgtgtggtccacattgttggcccttgtgtggtcacggaattttttcttcctctccagctggtgaatttgagtgttgaatcaggacaaggttttgggtttttgttgttttgttgtttttgtttttctatttctttgttttgttttgttttgtttttgagacggagtctcgctctgttacaaggctgaagtgcagtggcgcgatctcagctcattgtaacctccgcctcccgggttcaagcgattctcctgcctcagcctcccgagtagctgggattacaggcatgcgccaccacgcccggctaattttttttaatagagatggggtttcacaatgttgaccaggatggtcttgatttcttgacctcatgatctgcctgccttggcctcccaaagtgttgggattacaggcgtgagccaccgcgcctggctttttttgtttttttgttttttgagatggtgtcttgctctcattgtcccggctgaagtgcaatggctcaatctcggctcactgcaacctccgcccccggattcaagcgattctcctgcctcagccttccgagtagctggaattacaggcgcctgccaccacgccaggctaattttttgcatttttaatagagatggggttttgccatgttggccaggctggtcttgaactcctgacctcaggtgatccacctgcctcgacctcccaaagtgctgggattactgtgcccggcccagttttcctatttctttctttctttctttttttttttttttttttttttttttttttttttttgagacactgtcttgccctgtcgcccaggctggagtgcaatggtgggatctcagctcattgcaacctccgcctccgggattcaagctattctgcctcagcctcccgagtacctgggactacaggcacccgccaccacacccagctaatttttgtatttttagtagaaacagggtttcaccatattggcgaggctgatcttgaactcctgaccttgtgatctgcccgccttggcctcccaaaaagtgctgggattacaggtgtgagccaccgtgcctggccttttttccttttttttttttttttttattttgaggtggagttttgctcttgttgcccaggctggagtgcaatggtgcaatttcggctcaccacaacctctgcctcccgggttcaagtgattctcctgcctcagcctcgcgagtagctgggattacaggcatgtgctaccacgccctgctaattttgtatttttagtagagaccgggtttctccatgttggtcaggctggtctcgaattcccgacctcaggtgatccacctgccttggcctccccaagtgctggtattacaggcatgagccaccatgcctggccttttttcctatttcttaagcacctactgcatgtcaagtggtttccaaatgttatctcattaataccggatgtggtggctcatgcctgtaatctcagcactttgggaggccgagggcagatcacgaggtcaggagattgagaccatcttctggctaacacagtgaaaccctgtctctactaaaaatacaaaaaaattagccaggagtggtggcctgcgcttataatcccagctactcaggaggctgaggcaggagaatcgcttgaacacgggaggcggaggttgcagtgagccaagatcacaccacttcactccagcctgggcgacagagcgagactctgtctcaaaaaaaaaaaaaaaaaaaaaaaaggccaaatgttatctcatgcaaatctcacaacagccctatgcctggcaaacttaccctagttcaattagaagctctctgtgccaaaagaaactcacagaattggtgtccaaccagccgggcgcggtggctcacgttcatgcctgtaatcccagcattttgggaggccgaggcgggcagatcacaaggtcaggagatcaagaccatcctggctaacacggtgaaaccctgtctctactaaaaatacaaaaaaaaatagccaggcgtggtggcgaccgcctgtagtcccagctactcggaaggctgaggcaggagaatggcgtgaacccaggaggcgcagcttgcagtgagccaagatcgcgccactgcactccagcctaggcgacagagcgagactctgtctcaaaaaaaaaaaaaaaagaattggtgtccaaccgcgaatctgaaatgtgagacaaacgtgttctcaatttacagcagcctcccttcccaagcctctcatcacactgtcccccgagttcaaaggtcagcacttcaactaacttaacacagtccccaaacgcaagccaacttcttcaccctggaaagcactagctgttttaaacaatggcagggttagattctatgaatattgcccttactttagaacttgactctagagatgcttctttattttacccctatttgatagatgaagaacctgaagtacagaaaagctaagtgacttacccaagatcacacagtcaacaggcactagaatagtcagaagccagggctgtgtgactcaccaaaacctggatatgattctcctccctcttcagacttttctcaggtcagagcaggtaagtactgtaaagggatgtgcctggactttcagcctctcctgcctcttgacactagaatagaggctgagatgctgcagggcgacctacttcccaggcttctgttgctttttaaagatccagtctctgctggtggctttgggggaggaggaggtagggatggctccattagcttcctgtgttccctccccccatactccacccccaaggccaaagtcacacctgggctagcttagcatccccaaagtaggagggagagacctttcagcccacatgcaaagtaaagcagaaaaaccttattgtgtgttagcaggaagcgaaagaggaaaggtatcctattcttttttttttttttaattttttgagatggagtctcactctgttgcccaggctggagtgtagtcactgcaacctctgcctccccagttcaagcgattctcctgcctcagcctcccaagtagctgggattacaggcgtgggccaccacccccagctaatttttgtatttttagtagatagggtttcaccatgttggtcaggctggtcttgaactcctgaccttgtgatctgcccgccttggcctcccaaagtgctgagattataggcgtgagccaccacgacagctaggctgtttgttttttttttttttgagacggaatctcactttgttgcccgggctgaagtatagtggcacaatcttggctcactgcaacctttgccttctcagattcaggacattctcctgcctcagcctcccgaatagctggtattacaggtgcgcgccaccacgcccggctaattttttgtatttttagtagagacagggttgcaccacattggccaggctggtctcgaactcctggcctcaagtgatccttctgcctcagcctcccaaagtggtgagattacaggcgtgagccaccacgcccagccaacttttattttttgtagcaagaaaggtcttgctgtgttgtccaggctggtctcgaactcctgggctcaagtgatccacctgtgtctcggcctccccagtcactgggattacagatgtgagccaccattcttggcagggcagggtttttgtctgtttaggtagctgacttcacatagcagatgctcatcatttgttacatgagtcagtgctccaccccaacctgcacagactgcatctggcaaaatctgagagcctgtggtgtaccggggtaggcccacctcagcccactcccaggaccacagccctgtgccttccaccctctacttgctgaggccgtgtttctctgagtcttggtcctcttttgattgaaagtggaaggaggggccaggcacagtggctcatgccagtaatccctgaggccgcagatcacttgaggtcaggaaaccccggctctaccaaaaagataaaaattagccaggtgtggtggcacactcatgtagtcccagctactcaggaagctgaggcaggagaattgcttgaacctgggaggcagaggttgcagtgagcccagatcgcgccattgcactccagcctgggggcggagtgtgcctctgtctcaaaaaaaaaaaaaaaaaaaaaacgggaaggagggggctgggtgcagtggttcacacctgtaatcccagcactttgggaggccaaggtgggaagatggtttgagcccaggagttcccgaccagcctgaacaacacggtgagacttcgtctctacgaaaaataaaaaaaaaaaaatgagccgtgtctgatggcacatgcctgtagacctacccaggaggctgaggtgggaggatcgcttcagcccaggaggttgaggctgcagtgagctgtaatctcaccactgcactccagcctaggcaacagagggagactttatctcaaaaaaaaaaaaagaaagtggaagagggcccagccctaagctgggtaggagtgccaaggctgctcagctgctgccattcttgcctgggaagactggggtgagcctatagctgggggaccccccaacgttgctccaggtccagcaggtttgaggagttgggaggcaagggcatcttaaaacctgtgtgggtttggtggagaacaggtggagccaggcagcttctggctccaacaggatgggcagtggagccaggaggagggcatggaagggctaggtctgtgccaatgatcatgttctgtaaggttggacagagaaccccctcgccctctttctcttgagggtgtatgcatacagaagggacagactccagcctccctggaagggcttcaagtagctagaggactgagtggcccttcccccagtggagcacacagccccatggaatccagctctcagcactcctcacctcctctactaccaagatgcagtcccctccactcccctcctcagtctcccaggttctaccctcagcccccttcagtctattccccacaggagccagagggatcccctgaagatataaaacgtatgatgttgctacctcaaataccccccaaagccttctcctcacttaagaataaaatcctgggcacaacgcagtggctcaggcctgtaatcccagcactttgggaggccgaggtggatcacctgaggtcaggagttcgagaccagcctggccaacatggtgaaaccctgtctctaccaacaatacaaaaattagccaggcatggtggcaggcacctgtaatcccagctactcgggaggctgaggcaggagaatggcttgaacccaggaagtggatgttgcagtgagccgagatcgcgtcactgcacttcagcctgggtgtcagagacaagactctcaaaaaaaaaaaaaaaaaaagaataaaatcctgggccaggaatggctcatactggtaatcctagcagtttaggaggccgaggtgagagggttgcttgagcctagcagttgcagaccagcctgggcaacatagggagaccccgtctctacaaaaaaattaaagaactagcagagcatggtggtgtgaacctgtggtccctactacttgcggggctgaggtgggaggaggccaggaagtggaggctgcagtgaggcagtgagctgcgatcgtagcactgcactctagcctgggcgacagagcgagaccatctcccaaaaaaaaaaaaaaaaattcctgaattctccccaccataatccattcatccatcctcctcacttaggaggcccccatcaggcccaagctgtctccaacctggctgttccctctgcctgggactctgcctcacctccctcaggactctaatcaaatgtcacctaaaagacatacccgcctcctccctagctgcaaaagggcttcccctttttgtttgtgtctgtctccttctgtaagggcagggagggtgtggtctgcgtgctcccagctgttgtcccagagccttgcagagccctggcacataatagatgctcctaagtgtctgctgaatgcacaatgcaacagctttggccaagccaaaatggaactgtgaagagaaagtgagcctaaggtggcacggtagagatgcagcagtgaggggagataggtcttggggaaagtccaggcctacaggaggggatgtgcccctgtccttcctaacccttccatatcccgctccttactgggtcaggcccaggctttgacaggtacaatgccagcaacagggggaaggcttaggtccgacagcgcaaagaagacaaaccaagcacacagctccggcactaagtcaagttctttacttcccagaagtgatggctaaggggagggaggagggtgagaagaggaagacagaaagagccagagagaatgaggaggtgagaagggggggacagtaaaccactgttctatgaagtctcacgaggcaagtgctcaaggtaaaaaaagagtcctggagaatcgtccacggctgcgggaagcatctcggtttccttctgcttttaagtcctctcagggaaggctgtcgccgctgccgctgcattaaatagttatgtacatcgcagagagtcccaggccatgggcaggtgggggaggggcgtcatttcaccaggggccgagttttatcatcgtcaccgcactggtgagctttgtactttttcacttctgccatgtacttggcccacgcgtcacctttacttgttaatacctgtggaaaggggatacgggttaggacgggggtgccaggaaccagggtcaggactgccctgagacaggtgacccattcccagtgtcacccagaagactctgggtttgagctgaagattataaagtcaagttatctggggacccattgacagccctcctaccctgccaggcacactcataaaaggcctggataccagacagggagggagaaggctgggcgcaaaagctggaagggaaaggcaatgtgggtggaccccctgcaccaagctggctcacctcatcctccgtcttctgcttcttggctactattcccgtcttgagggctagtttgttcccgcctctgcgtttgcccacctgggtgaagggacagaagactgcaacggttacaggagccgggaccgcccttggcggcgctgaggcccactacaccttcctagcccggcctggtggcccgtcctgacgccgcgcccagctccgccagccggccgacctgcgcagcaatcagagaggagcacacgcgactcagcgcctgccctgggcccgcggtgccctcccagggagcaagaagagtgtccacctcagtagggaccagctctgttctcactttccacgccaaggcctcaccctccctagcagggaccacaagaggtggcaacagctccctttattgagcatgtactgtatgccaagccctgtgccaagtgctgtggatgtatcatctcctttcattttcacagctaccctaagatgaaagttagaaccaccccctttttgaccaggcgcggtggctcaggcctgtaatcccagcactttgggaggtagaatcgggtagatcacctgaagtcaggagtttgagaccagcctggccaacatggtgaaaccccatctctactaaaaatacaaaaacttagccgggagtggtggtaggcgcctgtaatcccagctacttgggaggctgaggcagaagaattgcttgaacctgggaggaggaggttgcagtgagccgaggttgcaccattgcactccagcctgggcaacaagaagtagactctgtctcaaaaaaaaaaaaaaaaaaagaaaagaaaaaaagaaccacccccttttcatagatgaggaaagtctttcaggagaggtcatgctaacaacaaacaatggagctgattcagggtcaggtgggtcgaagcctctggacagcatccttagacatcaagcaacattgccttccctgtgcctagcctggcatggcctctttgagggtgcagccaaaatggcccctcaatgaacaaatgaaaaagatgcaacgacgactgctactcccattcatgaagggactccactcgcaggtatcacaccaaccctggtcctgacgcttttccttccttacccttgcctcaaagagtcttcctctagcctttcatcctgtatcccaccttctcccattgattgagggcttcctgcgctccaggggctccaacagtcttcacagacaaccaggcattcagtaacctgtgctgctgggactatttccatttttttttttttttggagacagagtcttactgtcgaggctggagtgcagtggcatgatctcagctcactgcaacctccacctcccaggttcaagtgattctcctgcctcagcctcccgagtagctgggattacaggtatgcaccaccatgcctggctaatttttgtatttttagtagagtcagggtttcaccacgttggccaggctggtcttgaacccctgacctcaggtgatctgcccgcctcggcctcccaaagtgctgggattacagggatgagccacagagcctggcctgctgggattatttcacaccgattttttttttaagatactctcttgttctgtcatccaggctagagcgcagtggtgcaatcatggctcactgcagcctgaatctcctgggctcaagcgatcctcctgtctcagcctcctgggtagctggagctccaggcatgtgtggcaccatgcccagctaattttttaatttttttttgtagagatgcatttttgccatattgtccaggctggtctccaactcctgggcttaagcgatccacccacctcgacctcccaaaatgttggaattacaggtgtgagccactgcacccaacccacgcccatttttaacaaatgaagaaactgaggcttgcagaggttagatcatttgcccaaaatcacatgctggatccagaactagagcccccagtcttgttattctcaacactttttcctccacactacagggacttgatcttaacaccacagacatggcaagctcagagccaaaaatcaatatatgccctatttacttaatccagagtttctcaacctggcactaataacattttgagctggattattctttgtttgggggtgggagggcgctgccccacgcatggtaggaagttgagcagcatccctggcctctacccatagatgtcactagcaccccctcccgcagttctgacaaccaaaaatgtctccagactttgccaaatgtgggggtggagggaactgccccaattgagaaccaccagtttagcccttcctggaagacaggctctgtgctaaccacttttccaggatcacctcataaaaccctcaccacatcaagagatgctatgatgtctatttttgcaactagggaaaatgagggtaggcaaacccagaggctccaggaaagcagcgatcttgtctgtaagctcaccactgcataccagcacctagcacaatgcctagcacgaggtaaattgctcaataaatggaggttggtcgaataagatacaaggaagtcaagcaattgtcctagataagtaattgtccttacatagtacgtggtctgagtctaacacatatagctcagagtccagacttaaatttactccctttcctcacaattagtggtggtcccatgacccaaggtccgggtaccactcaaacaggaatcctgatatccacgtttcctcattctccacagtgctgattcctaggcaattcctcagctcccagttcccacgggcaagctcctggagtccccactcccgcccctagaccccagttgtcgggaatccaagttccacaccctcagcgggtgacccggacgggcccctcattcagaacggaaagtggacttcggtcccgatcccccttcacgggccccgactcccgctgccaagacaggccgtggcgcccgcccccacccccacggctccttacgaagctaagtgtggagcccggaccgcccttcctcttcggatccccggggccagcggcggcggccgactggtcgggtcgctgcggacccgggggcggctcctcctgccgctgccgctgctcctcctccatcttccgcttgaacagctccaggaagctgccgtcgttggcgaacaagttcacgccgcccgacaccgggctcgaacccgcgcccgacacctcctcgtccccgctctcgggcgacgtccccgatcccgactcagcccaacggctcccgccaccgccaccgcccgcggggcccggagcctcccggccctgaggctccgcccgtctccctcgggcagccattttgtcgccaggtgccgcgcaaaggactccgggaaggccgctccggccccgcgcttggcgcccgactcgcctcgtcccgaacaatgcatgccgggaagagcggtcaggccctccagcgcccgcagcgggggcggggcgaatgagggaaccaacccgaaggggcggggctagggggaggagcccccgtctcgcgggtttttttgtttcgttttttttttttctttttttttcagacggagtttccctcttgtttcccaggctggagtgcagtggcgcgatctcggctcaccacaacctccacctcccaggttcaagcgattctcctgcctcagcctcccgagtagctgggattacagacatgcgccaccacgcccagctaattttgtatttttagtagagacgggatttctccatgttggtcaggctggtaatctcccgacctcaggtgatccgcccgcctcggcctcccaaactgctgggattacaggcatgagccaccgcgcctggccttgttttttaaaaattagagacgggcgcctggctatattgcccaggctggtctcgaactcctggcctcaagcgatcctcctgccttggcctcccctcccaaagtgttgggattacaggcgtgagccatcgggcccagtcttgctgttttggtttttggttttttgtcttgttttggagacagagtcacactccgtctccgaggctggagtgcaaaggcatgatcagggctcacttcagcctcgacctctcagggctgaggcgatcctcccaccacagcctcccgagtagctggaaacacaggcatgcgccactacgcctggctaattttatttattcatttatttatttatttatatttgtggagacggggttttgtcatgttgcccaggctgttctcaaactcctaggctccagcagtcctcttacctcagcctcccaaagtgctgggattacaggcgtgagccaccgagccctgcctctcgggttttcaaaattcagcagtactcaggctggagttccccatacaggggctcccggagaatgagactgtcgtctgagactggggctgtagcttgctctctggagttggtttcacttggggctaggaacagattcgctttccagggctagaatccccgtctgacgacaccaagaataatctctatgagtggaaggacctcatctggggctgtgtgctcagctgacacctgggaacttgaatccctaactggggaatagagagcatgtctagtctgggccccccaagtagaaataggggtatctttgggttgggtaaccatctctgggataaagctcacatttgttggggacatagctggctctgtggagctgaagtccccgtctgagaatcagcttacttttttattttattattgttattattactttattttattttgttttattttattttttgagacggagtctctctctgtcgcccaggctggagtgcagtggcgtgatctcggctcactgcaacctccgcctcccgagttcaagcgattcttctgcctcaacctggtctcgattcctgacctcgtgatctgcctgcctcggcctcccaaagtgctgggattacaggcgtgagccaacgcgcccagcctattttatttatttatttagagacggagtttcactctttcacccaggctggagtggagtgaagtggcgcaatctcggctcgctgcaacctctgccctccgggttcaagcgattctcctgcttcagcctcctaagtagctgggattacaggcgcgtgccaccacgcccggctaatttttgtatttttagtagagacaggttttcaccatcttggccaggctggtcccgaactcttgacctcaggtgatccacccgcctcaacctcccaaagtggtaggattacaggcgtgagccaccgcgcccggcccgagaatcagcttattttatgagctgtagtattcagatgaagtcggggttatttctagtctgtagtctccctctaaagttaagagtgtcatgggctggggtctccatcaagggcctggaacccagcttctgttcctgctctaagacagaggttcaaacatgaaatatggtatactggagtcttctcttgaaatacaaggagacttttaggaattccttctacgaaacggagcgcaattgcaggaatggtgtctgctaggcatgggagatcagggcgtacaggacaagactctgtggactcgcccactctaagccactatcagcccggggacctatcgccaaccgagtcaattcgtctatgattggtttgcggcaagagccaagaggctcacagcctattgaataacagagggggcggacctgaggtgaggttgggacctaccgtgaagaatagagggaaaatgatggacataaagttgagcctatggagtcaggccaaggaggaccgggaatctaacttcaccgaaagggcatggactgggtgtttggctggttgctaaggtgaggttggcgctaccggaacataagagtgattggtgtaagtaagaaaagacatagccaatgaaaggagagctgcaagacctagggcccaatcagtgaaagggagtagcctagaccgtaccgatgtgttcattaggtagggggaacccttggaaaattatagaccagaggttgacaaagtgaaccctggaagcaaagaatagtgaaaatataatttatatttctcctaaaaggcaagtaatgaggaaattaactcatgctcctagcttcgctaggaatgtgatagagaatttcccctgtaggttcttcgtatggtgcgctccgctggatcacgtgagccagttccaaaatggcggcaggggtggccgggtggggggttgaggcagaggagttcgaagatgctcctgatgtggagccgctggagcctacacttagcaacatcatcgagcagcgcagcctgaagtggatcttcgtcgggggcaagggtggtgtgggcaagaccacctgcaggtaaggaggctgcggcgggggccaggaggcgtgtaggatataccactgggcgaaggggaggccaaggaccggcttttccaccacgaccggggcatgggggctggcgggggtctttgggtttcactctctggaagttacctggagcaaatgagaaagacctcaatgcagccctagcaccctctgagttggaccatccgtgttggggctcaagtgccgaaccacagtgaactcagcgcccgggggacggggaagcacttagatatccccatcagctggaccgtacctgagtgaatccagagttgtgggtgagggcggcaccagaacaagcaatcctagtttggtgaaccttggtgttttatgcccaaggcgagagtgagggtggaaagcgagggagagagcacgtgatgagactgtcccaggcagctacaggcaggaggtgtccgttggacagattatcctggacaagcagactgaaccatcctgtgcttactagggaatgcaggagaccccttagcttattaaggaagggggcacggagtcaagctatgctggctggaccgctgggccatgccactgtgcccagcaaaaaagaagcaggcactaggccagacagactcagtcagctgaaccttacctctctagtccacatagaggggtcaggagataaatcagagagggttcctttgtagggactgaggctcaatcccaccataacccatactctcctctcaaggcccctgctgattcgggtcacctgctccagggaacctaccactccccttgcagacccagggaacagagcccatcccctcatcccctatcttttgacttttccattactcagctgcagcctggcagtccagctctccaaggggcgtgagagtgttctgatcatctccacagacccagcacacaacatctcagatgcttttgaccagaagttctcaaaggtgcctaccaaggtcaaaggctatgacaacctctttgctatggtgagtggaacagggcttagcccccacttctgggaaaagcctcttccagcctttcttgtgcgcacacaccagcagccaccgtgtcctatccactctatatcctgtgtctctcgtgtttcactccttcctcaacatactcacaagggaaccaatgaggaattgcagagcaggaagcacaccagagtgcctgaagcttagtgagccagggtaggggaaggagaagttggagagaccaatcagagccacatggtgtgggaccttatgggccactaagaagtttggcattgactccaggttattaacgggaagctgtttgttttaagcagggcaatgtcgtggccaaattcatgtttgaaaagtaccctttgacggccaggtggagatttaattgtcagtcagggtagaagcagggaaactaacaaggagattgggggtgtaaccagttgagagatgacaacatcctggactctggtggaggcagaatgttgggggagaagtagtcagacttgaggttttttttttttttagacactcaagactcctctgtctcccaggctggagtgcagtaacccgatctaggctgactgcaacctccgcctcccaggttcaagcaatgctcctgcctcagcctcccgagtagctggcactacaggcttgcgccaccactgcctgttaattttgttttttttaggagacaggttttcaccatattggccaggctggtctcaaactcctgacctcaagtgatctgactgcctcggcctcccacagtgctgggattacaggcatgagccaccacatcgcaccagggatgtattttggaagtaaaccagtaagattacttgggtgagaaaaagaaatgaattgattacatgtctttcttgtctctctgagcagctgggatggggaaaactaggaaaggagtaggtttagaatgaacaaataaagaatttcattttgtccacagtgaatctgagttgcccactggaaatccaagtgtaaacatcatgacagtagcttgtttatgtgagtctggagcccagaggaggttggcattgatttggaagtcactgtctcaagggtggcatttaaagctgtgtgagggctgggcatggtggctcattcctgtaatcctagcactttgagaagccaaggtgggcggatcacttgaggtcaagagtttgagaccagcctggccaacatggtgaaaccccatcactactaaaaatataaaccaattagctgggcatggtggcaggtgcctgtaataccagctactcagaaggctaaggtaggagaatcgctagaacccaggaagcagagattctcctgcctcagcctccggagttgctgggattacaggtgcctaccaccatgcccggctaatttttgtatttttagtagagacgaggttttctcacgtctcaaaaaaaaaaaaaattggctgggcgcagtggctcactcctgtcatcccagcactgtgggagaccgaggcgggtggatcacaaggtcaggagatcaagaccctcctggctaacacggtgaaagcccatctctactaaaaatacaaaaaatagctgggcatggtggcaggcgcctttagtcccagctgctcaggaggctgaggcaggagagtggcgtgaaccccggaggcggagcttgcagtgagctgagatcgcgccactgcactccagcctgggcgacagagcaacactctgtctcaaaaaaataataaaggccgggcacggtggctcacatctgtaatctcagcactttgggaggctgaggcgggcagatcacaaggtcaagagactgagaccatcttggctaacacggtgaaacctcatctctactaaaaatacaaaaaaattagccaggtatggtggcgggcacctgtagtcccagctactccggaggctgaggcaggagaatggcgtgaacgcgggaagtggaccttgcagtgagccgagatcgcgccactgctttacagcctgaacaacggagcgagactcaacaaaaaataataaataaaaataaaataaaataaagagatgctgcagagtgaggatgctggcagaggacagtcctcaggtgggatgagctccatccagcatacagacccagaacttgggcgctgccagggtcagggactgggagggaaacaggaggaattggggcacttcccgggcagagatgagggtgttggcagccaatggcttctctttctcaccaaggaacaggcaagggtctcagcagtgaatgggatagaagtttgaggagggagaaaataccacataaacacttattaaggtagcagggggaaccagaattgtctggatcatcaagtgcccattggagatttgtgttcagaagaggggagcaagggcgggcgtggtggctcatgcctgtaatcccagcacttcgggaggctgaggcaggtggatcagaaggtcaggagttaaagaccagcctagccaagatggtggaactccatctctactaaaaatacaaaaattagctgggcatggtggctcacgcctgtaatcccagcactctgggaggccgaggtgggcggatcacaaagtcaggagattgagaccagcctggctaacagggtgaaaccccatctctactaaaaatacaaaaagttagccgggcgtgatggcgggtgcctttaatcccagttattcgggaggctgaggcaggagaatggcgtgaacgcgggaggtggagcttacagtgagcctagatcgcgccactgcactccagcgtgggtgacagagcaagactccatctcaaaaaaaaaaatacaaaaataagccaggcacggtggctcacgcctgtaatcccagcactttgggaggctgaggcgggcagatcacctgaggtcgggagttcgagaccagcctgaccaatatggtgaaaccccgtctctactaaaaatacaaaaattagccttgcgtggtggccggcacctgtagtcccagttacacgggaggctgaggcaggagaattgcttgaacctgggagacggaggttgcagtgagccgagatcatgccactgcactccagcctgggatacagagcgacactccatctcaaaaaaaaaaaattagttgggcctggtggtgggcgcctgtaatcccagatactcgggaggctgaggcaaagaattgcttgaacctgggaggcggaggtcacagtgagtcgagattgtgccactgtactccaacctggatgacagagcgagactccgtctccaaaagggtgaggagcaagatgggaatactcttcaggagtgttcggccctcaagtgcagtgatactaaagagctagaaagccatacctatcatttcagtgcttgcagagactgagacaagaggatcacgtgaggtcaggagttcaagaccagcctgggcaacaaagggagaccctttctctacaaaaaacaaacaaaattagctgggcatggtggtgtgtgcctatagtcccagtaagttggtaggttgaggcaggaggatcatttgagcctaagagtttgaggctgcaatgagctatgtatgagatggtatcttttttttttttttttttgagactgagtttcactctgtcacccaggctggagtgcagtggtgtgatctcagctcactgcaacctctacctcctgagtttaagcgattctcctgcctcagcctcccaagtagctgtgattacaggcgcccgccaccacatccggctaatttttgttttgggggggttttttttgtttgttttgagacggagtcttattctgtcgcccaggatggagtgcagtggcgcaatctcggttcactgcaacctcttcctcccgatttcaagtgattctcctgcctcagcctcccgagtagctgggactccaggtgcatgccaccatgcccggctaatttttagtatttttagtagagacggggtttcaccatgttaaccaggatggtctcgatctcctgacctcgtgatccacccgccttggcctcccaaagtgctgggattacaggcgtgagccaccgcgcctggcctgtatttttttttagtagagacggggtttcaacatgttggccaggctgttttcaatctcctgacctcaaatgatctgcctggcttggcttcctaatacactgggattacaagtgtgagctaccgcgcccggccaagacgctatctctaaaagaaagaaaaaaaaagctggaagtaaccagagtgggggattttgccaacagcaaggggaaagggagtgtttgcagagggaacctgtggaggctgggctggataagggtgccagccaagaggaacactgacagtttacaggggccaggtgaggggatgaagtagtccaaagaagcttaaaatatatgaagcataagaagagggtgcagtgatgagtgggcaagctccccaacagggaatgacccctaaggccagcgagttgggtacttccccatgggacccatgaagttaccaagaagaggtgacagaggaggaagataaagagggaggcattggccgggcatggtggctcatacctgtaatcccagcattttgggaggctgaggtgggtggatcacctgaggttgggagttgaaaaccagcctgaccaacatagagaagccccgtctctactaaaaatacaaaattagctggggtggtggcgcatgcctgtaatcccagctactcaggaagctgaggcaggagaatcacttgaaccctggaggcggaggttgcagtgagccaagatcacgccattgtccagcctagacaacaagagtgaaactccatctcagaaaaaaaaaaaattacaaaaattagccaggcatggccaggcgtgatggctcgtgcctgtaatcccagcactttgggaggccgaggtgggtggatcacgaggtcaggagatcgccaccatcctggctaacacagtgaaaccccgtctctactaaaaatacaaaaaattagccaggtgtggtggcgggcgcctgtagtcccagctactcactgcactccagcctgggtgacagagcgagactccatctcttttttttttttttttttttttttgagatggagtctcgctctgtcgcccaggctggagtgcagtggcgtgatctcagctcactgcaggctccgccccctggggttcatgccattctcctgcctcagcctcccaagtagctgggactacaggcacccgccacctcgcccggctaattttttgtatttttagtagagacggggtttcaccgtgttagccaggatggtctcgatctcctaacctcaggtgatctgcctgcctcggcctcccaaagtgctgggattacaggcgtgagccaccacgcccggccaagactccatctcaaaaaaaaaaaaaaaaaaaaaaattagccaggcatggtggggcatgcctatagtctcagctactcgggaggctgaggcaggagaattgcttgaacccagaaggtggaggttgtgatgagctgagatcgcgccactgcactccagcctaggcaacaagatcaaaactccatctcgggaaaaaaaaaaaaaaaagagggaggcattgagtctgagactggccagggaccccagccatggccatcccttcatagattctacatacatgtttgtgttttgttttgttgtttgttttttgagacagagtctccctctgtcacccaggctggagtgtaatggcgtgatctcggctcactgtaacctctgcctcccgggttcaagcgattcccctgcctcaacctccagagtagctgggattataggcacccgccactatgcatggctaatttttgtatttttagtagagacggggtttcaccatgttggccaggctggcctcaagctcccgacctcaggtgatctgcccgcctccgcttcccaaagggctggaattacaggcatgaggtaccgcgcctggctggattccccatatgtgctgacgacctctgtgccaggcactgttcatgctaagcgctaaggacacagcagtgaactagatggtaaaacccctgcccctgaggggcagacattcctgctatggagacagatgataaacatgataagggaatcatgagggatgtgaggaagggctaatttttttttcagataggtcttgctatattgcccaggctggtgtccaactcctgggctcaagcgatcctcccatctcattctcctgagtacctgggactacaggcgtgagctatcctgcccagctcctaagggctaaaccttaaggagaaaggaaggcagggcaggggtgtcggtggatctgtgctgttacttagggtggtcagggagtctctcagtggagggatgatgatccggaagaggtcatggcccagtcatgggagtatctggggttgcaagtggcaggttgcaagtggggagtagcagtgtaaatggcccgcagtgggtttcagcttccctttgagggccctgggcacagcttgcaattttccccttgtttttgaccctttatgcaaccatacaaaaccctaagtactacctcagggtccccccagccgtgacctaatgaaatgcctgtggtcacagcccaccacaggctccctctggccctgtgcccgggtaggaaggctccccctggccctgtgcccaggtgggaaggctcccccagcagtagcagcaacctcagtctcatccctttggcccccaggagattgaccccagcctgggcgtggcggagctgcctgacgagttcttcgaggaggacaacatgctgagcatgggcaagaagatgatgcaggaggccatgagcgcatttcccggcatcgatgaggccatgagctatgccgaggtcatgaggtcaggcccagccagcaggggtgggggctgcctggggaaggggaagagcggacacagagggcctgacccctgtctcccctcaggctggtgaagggcatgaacttctcggtggtggtatttgacacggcacccacgggccacaccctgaggctgctcaacttccccaccatcgtggagcggggcctgggccggcttatgcagatcaagaaccagatcagccctttcatctcacaggcaggcggcgggggcccccacctgcaccatccaggcagccgggagtgggagtaggcccgggcccccagaccctcaaatgcgcactaacaattccctttccttcccaccccttctcactctggacttctccctggaggggatgggacggagctgtctttcctcccccacaggcaggactcagtgtccctgcccctgcccgctaaataccctagacagagccagaaagcacattccagaaccaggcaacctgccttcaaaccctctacactcaccatgtgacccaactgctgtgtgacctcaagcaaatcacttcacctctctgggcctcaccttccttgtcttgcaaatggagatcatgagagtgccccatgggttattattattattattcgagacggagtctcgctctgtcacccaggctggagtgcagtggtgcgatcttggctcattgcaacctccacctcgtgggttcaagtgattctcgtgcctctacctcccaagtagctgggactacagacatgtaccaccatgcccagctaatttttgtactttttgtagagatagggttttgccatgttgcccaggctggtcttgaactcctggcctcaagcagtacacccacttcgacctcccagagtgctgggattacaggcatgagccactgtgcccagcccccatgggttattattacgatgacaaccctaaagcccccacagtgctgcacaccaccagcaccacccaccatggtgtatgtgcacgtgtgggtgtgtgcgtgtcccctgtggggacctgtgcctcaggtggtaacactgagcacttactgtgtgccagacactattctcagcacattatatgcttcagctcatctggtacaacagatctgggaggtaaagtttagagatggggaaactgaggctccaggagggtcaagccccttagctatggttccctaaaaatggcaaagctgaggccggccgcagtggctcatgcctgtaatcctaggacttcgcaaggccgaggcaggtggattgcctgaggtcaggagttcaagaccagcctggccaaaatggtgaaaccccaccagtactaaaaatacaaaaattagccgggcatggtggtgcgcgcctgtaatcccagctactcaagaggctgaggcaggagaatcgcttgaacccaggaggcggcggttgcagtgagccaaaatcacgccattgtactccagcctgggcaacagagtgagactccatttcaaaaaaaaaaaaaaaagaaagaaagaaatggaaaagctagtatttgaccaaccccaggaatctgcttatgggcctgagcctttaaccactgggaggtatcaggagtcatccctcgggtgtttagtgaacccccaacccaggaggtcgccgcaggtaagctatgagccctcccacatcccccctgcagatgtgcaacatgctgggcctgggggacatgaacgcagaccagctggcctccaagctggaggagacgctgcccgtcatccgctcagtcagcgaacagttcaaggaccctgtgagtggtggtctggctggcggtgagaggcccgggggctgaggacaggggcagaccccgcccctcactgtcctctctcgtgccctgtaggagcagacaactttcatctgcgtatgcattgctgagttcctgtccctgtatgagacagagaggctgatccaggagctggccaagtgcaagattgacacacacaatataattgtcaaccagctcgtcttccccgaccccgagaagccctgcaagatgtgtgaggcccgtcacaagatccaggccaagtatctggaccaggtgtgcccacccacccagcactggctcagcagaggcacctctgcccctttattctctgatcttttgctccaccatctggccctctgccctctagcctcctgccctttgcccccacatttcagatccttcacccttattccggccatagaggactgtggctggcctggcctaggtccctgtgaccctggagagcagggggtctagcccagtgatctctgaccatagtgatgcagctcccacttatgacaccttaagctcctgccctatattctctccctgactctggaagctttctagctttaccgcttctattgatccacactctgtctctgccttcctgccccctgaccactgccttctaccctctgccctggctgcagatggaggacctgtatgaagacttccacatcgtgaagctgccgctgttaccccatgaggtgcggggggcagacaaggtcaacaccttctcggccctcctcctggagccctacaagccccccagtgcccagtagcacagctgccagccccaaccgctgccatttcacactcaccctccaccctccccaccccctcggggcagagtttgcacaaagtcccccccataatacagggggagccacttgggcaggaggcagggaggggtccattccccctggtggggctggtggggagctgtagttgccccctacctctcccacctcttgctcttcaataaaatgatcttaaactgctgtattgttgacattgggaggtgagggtaagcacctttatgtacagttgcacaggttgtgcactggacagaagtgtcacatctagaggggcccattcacaacagagacctaatagagatgcatgtttattgtggcaactttggaaggagggtgtcttgggtgagagatacctttgtctcattctgtgtgggttaaggtgtccctgttgggcctgtgaagcctggaatggaagacagaggcattttcccacttccttggaggctcagagcgtgggaactgggaggccccttggccagccccaggctggtggggagcagagcagattaggccggcagtgggcccggcactgcctgctgtttggtttgggaattagtgggcgccctggggagaggccaggcctgccagactggggattaacagtctccaccccccaattcctgcccccatgggatggcatcagcccctcccagcaaagggctgcagcaagggggctggttagtgggcagggtgacagaggactccggctggaggggctcctgaagtctcatcctgactccagagcggtctcaggctgtgggcacacaggcctggaaggcacctagtggacccccttatcccctgcccttcgctcctccctctgccactgcctgggctgctattgttgtccccacttgggagactcaggatggggtatgaccttgagagtttacaagttccaagccagagctggctaggggggacagaaagggggttcctgaggacacacgtgagtcggtgttcaggccgggcgcggtggctcacacctgtaatcccagcactttgggaggccgaggtgggtggatcacttgaggccaggagttcaagaccagcctggccaacatggcgaaacctcgtctctacttaaaatacaaaaattagtcgggcatggtgttggggtgcttgtagtcccagctgctccagaggcttaggtgggagaatcgcttgaaccccggaggcagaggttgcagtgagccaagacagggtaagaccctgtctcaaaaaacaaaagtggtgttcaggtccagtcatggtggctcacgcgtgtaatcccagcactttgggaggccgaggcaggtggatcacgaggtcaggagttggaggccagcctccaactactctctactaaaaagacaaaaattagtcaggcgtggtggtgcccacctataatcccagctacttgcgaggctgaggcaggagaatcacttgaacctgggaggcagaggttgcactgagccgagattgcgccattgcactccagcctgggcaataaagtgagactccgtctcaaaaaaaaagtgttcagacccagagtctgggtgtgccagggtgtgtgtgtaaggggaaccccaccaggagcctagacttgtcactccaactccctggggtgtgcacaagcaggtgtgggcctgttggggtggcatgtgtaaacaaacacgatggtacagccggctccgcgccaaactgccaggatccaaatcccagctgtgctacgaacaagatgagatgtgacatcggagcctcagtttccctacttagatagtaagatgaccaacttagcatgcccgtaaggattccatgagatgaaacacgcaaggcgtttataccagcaccagacaggaaaccgcaagaaatgtttgttatttttcgttgtcacaattagtaagcatatcaaatagcccaggaagcctgcccccagcccctgcgggaattcagcagtcggaagtgtgtggggatgcgggtgagctggggtagggaggatgaaaaggaggagcgggcttcagtgaatgcaaggacacttcctagggagtgagggctgctgatcgagaactgagctcatcagcaccgagcctgccaccgccttgccaggttccgcagctgacggcaccgccccagctgccccctcgcccccatttatgggctgtccggcagctggacagcgaaggcatgggtcacagggtgaccagcccaggcgggttcctaattactccgggcagggtgaacatctgccagtctgggaacacggcgtcccagcctgctgggcttggaacctcgggcggggctatgtagaatgcacgaggggctcctgagcactctaggatgcccatcccagggtttgacccctgaacttctgcccctcccacaccaatctgtgtgttaatgttcttcaggctgggcaatggagggggagtgggtactgtttgtaccaggctgggagtgtcccctttagaggtgtgtctgtgaagaatgaacatctgcccagaatccatgccaaatgcaggacaaggttttgtgtccccaagcttgtgtgttcatggcaatgctgagagtatctgagacctgtgggtgtgggtgtgggcctgccgccgggagggagcgttggaaagggggttgccttcacatattggtgtacaaatgctggtgaatttcaccagcggtgatagctaggggacccttgagggaggggtggctgttgtgtgtgtctttgcaagattggtgaacctcaggccccgctctgagcctgggattgtgtgccaccgcactgaggaaagggtttttgcatttggtgtgtgatcatggctgcatctttgcacagggaagatcgggagtaaaacctccttgcagtggagtatgactgtgtgtgtgaaggcattctgaggtctgggtggggtctggcacttggctggttgtgtgggtgtctttgttacatggcgtgatcatgacggaattcagaccgttgggagagccgtgtgtatgaaagaggagagcctagtatgtcagggtccacctgccttatatatgcgtgatggaggcaggaggggtcgaggtaggtgtgtcttgtgtgaccctggaaggttctgtgacagtgtgtactgctcctctgggtaaccatagttatgtgaggctgtctttttgttttttcaatagagatggggatctccctatgttgcccaggctggtctcgaactcctggctcaagtgatcctcccacctaagcctcccaaagtgctaaaattacaagtgtgagccatcgtgcctggctgaggctgtcttaagagcagctagatttgcttctgggactatgatgtgtgtttctgcgtgcatctctgtgacactgtgtgattacaggtgactgtgaagtgacccagcctcactgagcagtgtgtgtgtttctgggactgggaaaaagaccatccctgcctcctcccccaacctctgggttccagatccctaggacctgccagtgagcgactgggaggggaacagggaggggcgagggaggacaaggcggatttctccccccgtaccaggtaacaaacttgtgggactccaaacaaaattctgaagctacagcctagccgagggaggaggaccaggaaagggaggcacgcccactccccagccccacccaacgccaaagccacccgcccattccatccctgtccctgtgggtccttgcaccggccaccttcaacacaggtgagatgagcccaggcttggggaaatagggggccctgagggaagagggaacctgcgggcaggaatgcatccggagtcctcccggggcggggagtggagggcttggaaggctggaggggaacggagagaggaaaggtcaaggcggatccgggaggaaaagggagtggggggagccagggcaattaagcagaaggtgcacaggctggggcaggggggctaggggacctggaggcttagggacagggcttcagagggagtgcagggagcagaatgggtcaagactgggagctggggaagtggagaagggggagccagaaataggggctgagggagagaatttgggagaggtggagccttgagaacctagaaactcaggtgctggggacttgcggaatggggcatgctacaggtggcctctgggtgaaggggatcgggcagagggtgactcgggagctgactgcagggactcaagggtcttggtggtgggggacggcagttaccagagcccacggccaggagtccagggaaggggacagcctgagatgaaggtcagggaggggcactgggggctggactagactgagtaaagctgggaggagaaggcaactcaggcaagggtcaggactgaaggggtggcgggccggaacatgggtggaatccctgtgctcagttatccccgcacctctccacccacacccgcagcccccacccgggccacccactctcccttggccacacctgccgggtgccacgatgaccgtcacctacacagcccgagtggcgaacgcccgcttcggtggcttctcccagctgctgctactgtggcgtgggagcatctacaaactcctgtggcgagagctgctctgcttccttgggttctacatggcgctgagtgctgcctaccggtgaggctgccctgaggtgctcatgttctagcggagggggggcagctattatatatatataatatataaaaattataaaaatatagagatatataagtatatatatctatgttttttaaactgagatggagtctcactctgtcacccaggctggagtgcagtggcataatcttctcttacttccacctctgcctcccgggttcaagcgattctcctgcctcagcctcccgagtagctgggattatgggtgccagccaccatgcctggctaatttttttgtatttttagtagagatggggtttcaccgtgttgaccaggctggtctcaaacttctgacctcaagtgatcctcctgcctcggcctcccaaagtgctgggattacaggtgtgacccatagcacccggctgggggcagctattataaaagaagccagggtgaggggcacagcaagagagatctgaagctggggatggagtcacccttgtgacctgtgacccctcatctctatcccgcagctttgtgctgaccgaagggcagaagcgctacttcgagaagcttgtgatttattgtgaccagtatgccagcctcatccctgtctccttcgtgcttggtgcggtccaaccccaagtcccccgttcccatgtccctgagaaacccatatccattcatgccttttgaggagcccccattcctgcccctctgagatcccccccctcaaatccaaccccgacagcactgcccacccatttttggatccatatcatgaagatgccagatgtggctctacactctgagacctggggtgtcacctggggtcacagtgccccctgaggtgcccccaggagagctccatctcacacacaggacttattcctggtcaccctggggattctcaccagtgtctgttgtgttattaggggggacaaacccctaaccctccagggaccccataggactccatcctctcaattccagcctgggggcatttctctgacaagtcttggacccctagtgaccacaagtgaccctagcctgcccaaggctccctgatgtagaccctgtccccaaccccttcagaagttcctggctcaggggccgggtgtggctactgtgacaagcctgaccagatgtctctgatgtacacccccacaaaccaggcccctctccccttgttttaggtccctatgccttcacagcaagcaacagtctgcccacgtgcccctaacatgggctctgtgcctctatccccatactgggatcccaatgtcacatctgaggtgactcccaagtagccagtgacccaaagggctgctctgcctttttttttttttttttttttttttttttttgagatggagtctcgctctgttgcccaagctggagtgcaatggtgcgatctcagctcactgcaacctccgcctcccgggttcaagtgattcttctgcctcagcctcctgaatagctgagactacaggtgcgccaccatgcccggctaatttttgtatttttagtagagacggagtttcaccatgctggtcaggctggtctcaaactcctgacctcatgatccaccctcctcagcctcccaaggagctgggattacaggcgtgagccaccgcgcccggcaactgtcctttctgacctcagggctggacccccaagttcccagcccaaacgtggtcaggttggccagcacgctcgggtttccctgatgcagaccttacgttgccccctctcccacaacctgggcccccaaacccctggccctggtgtccccactgagcccccattccccgctcccctgcaggcttttatgtgacgctggtggtgaaccgctggtggagccagtacctatgcatgccgctgcccgacgcgctcatgtgcgtggtggcgggcaccgtgcacggacgcgacgaccgcggccgcctctaccggcgcacactcatgcgctacgcagggctctcggccgtgctcatcctgcgctccgtcagcaccgcggtgttcaagcgcttccccaccatagaccacgtggtggaggctggtgagtactcggccagaggcagggcagagaccgggcaaggaccaggtggaggggggcaaggggcgagctatccctgacccctttcctccagggtttatgacccgcgaggagcgcaagaagtttgaaaacctgaactcatcctacaacaagtactgggtgccctgcgtctggttctccaacctggcggcacaggcccgacgcgagggccgcatccgcgacaacagcgcccttaagctgctgctcgaggtgggcccaaccaggaggtcattcatatagaataccagggaaattgtacccctggagctgtgtcaacggcggccctccaagcacccccacgaggccgatttcaaacaccctcaccaggtgcactcttacctccatggggctgattccaatgcccttgaggggcagctcctgggtgcatggtacctcatccaggtgcacactcaccaccaaataccctccctggaacccccaaagcacactcccaattcccaccaggtgaccacccacctccatcccacgtacctacacttaatatccctgtgtgagctcaccattcaggcctcctcatgacctgtatccacccccaggagctgaatgtttttcggggcaaatgtggaatgctctttcactatgactggattagcgtacccctcgtgtacacgcaggtaaccccatcatgcctctttttatattcggtgtcagtggccctgatgcctggtttccaaggggaaaccaagaactagctaagacccccatcataatgatgcctaatcctagccttggaccccaatgacccccctgagccctgccccgccctgcccaggtggtgaccatcgcactgtacagctacttcctggcttgcctcattggtcgccagttcctggacccggctcagggttacaaagaccacgacctagacctgtgtgtgcccatcttcaccctcttgcagttcttcttctacgccggctggctcaaggtaggtgggtgatccaggctggaatttcgtgggtggggcgggcatggggttcccaagtttccacctaactgctccctctcctctcaggtagctgagcagctcatcaaccccttcggagaggacgatgatgactttgagaccaactttctgatcgatagaaacttccaggtgagactcagtttccaggtgagacttccaggtggcgaccatcccggagtgcccaacagggttctggtcccacccctgccaagtcttgccaggtctcaccccaaccatccttccctctgtggtccccacccacccgaaggggtccaccctgtggtcccggcgggttgccctgcccccactttaccctgtgtgtttgcacccgtaggtgtccatgctggcagtggacgagatgtatgatgacctggctgtgctggagaaggacttgtactgggatgcagccgaggctcgcgccccatacacagcggctactgtcttccagctgcggcagccttccttccagggctccacctttgacatcacgtgagccagttgggtgggcagggccgcctggggcagggcttatggctctgcggggcacatctgattgaaaaggttaagtggaatcaattctggagatggggataagagctaaagtctcaggactgtgataacgccagaagctaagataggagtcaggggacaaggtcaaggtctgagactgggccactgactggggacagagctaagggctgaggtcagcgaggatcagaccggtcagtggtgattccaaaggagatgagggctgaggccaggagcactggctcacgcctgtaatcccagtactttgggaggctgaggcaggaggatcctttgagcaagcccaggagttcagaccagcctgggcaacatagtgagacccccgtctctactaaaaataaaaaattagccaagcgtggtggtgcacgcctgtagtcccagctattcaggggctgaggtgggaggattgcttgagtcgaggagttcgaggctgcagtgagccataatgacaccactgcactccagcctgggcaacagagcaagagcctgtctcaaaaaatgaaaataaaggccaggcgcagtggcttatgcctgtaatcccagcactttgggaggccaaggcaggtggatcacttgaggtcaggagttcgagaccagcctggccaacatagtgaaaccctgtctctactaaaaatacaaaattagccgggcttggtggctcacgcctgtaatcccagctaatcgggaggctgaggcaggagaatcacttgaacctgggaggcagaggttgcagtgagccgagattgcgccattgcactccagcctgggccacaagagtaaaactgcatttcaaaacataaaaataggccgggtgcggtggctcacgccaaggtgggcagatcacgaggtcaggggttagagactagcctggccaacatggtgaaaccccatctctactaaaaatacaaaaattagccggtgtggtggcacgcacctgtagtcgcaggtactcaggaggctgagacaggagaatcgcttgaacccgggaggcgaaggttgtggtgagccgagattgcgccactgtactccagcctgggcaacagagcgagactccgtctcaaaataaaataaaataaaataaaaataaaaaaggaaatggggctgagccacgactgaggttgaagatccaagttgaagtgcaaacacagggtgaggccaggctctgggtttaggagctaagatctttggggataagtgggacaaagcggtgggtggagtcagggaaatcagcgcgcctgggaccctgctctgtcaacaagaggcgaggccgcagcgctggcccactgtcggtcccgcaggctggccaaagaagacatgcagttccagcggctggacggcttggatggaccgatgggagaggcgcccggcgacttcctgcagcgcctcctgccggcgggcgcgggcatggtcgcgggaggcccgctgggccggcgcctgtcctttctactccgcaagaacagctgcgtgtcggaggcgtctactggggccagctgctcatgcgcggttgtccccgaaggcgcggccccggagtgcagctgcggggacccgctgctcgaccccggcctgccggagcccgaggccccgccccctgcgggtcccgaaccgcttaccctcatccctgggcctgtcgagcccttcagcatcgtgaccatgcccgggccccggggtccggcgccaccctggctgcccagccctattggcgaggaggaggagaatctggcctgagatcttagagcccagccccctaaggacagggaaccaggtccctgcacggcacccacgcaggtgtcccggtctgcataagcctcgtgtgcctttgtaaagtccacctacacttttgaccagctctcgctgcccgcatgtgtttggcgctgtgctaggggcgggagttcttccagactcttggaccagcccgccctgaccaccagctctacttcccaacccccactgcctgagaggtctctatcagtgtcctgcctgaattctttccttcaagtgaagatgtgactgactacctcctcgagttgtcatgaggatgaaagaatggcattaaagcatttggtatacagtaggtgctcaataaattgctagtgatttttactcaaacgttgttagtctgatttctcctgccagacattatccattgtcctaagtaaaatttgggagttcttgcaggttcttttttttttttttttttttgagacggagtctctctctgttgcccagcctggagtgcaatggtgtgatttctgctcactgcaacctctgcctcccaggcccaagcaattctcctgccttagcctcccaagtatctgggattacaggcacgcaccaccacacccagctaactttttttaatttttagtagagaggggggtttcaccatgttggccaggctggtttcgaactcttgacttcaggtgatccacccacctctgccccccagagtgctgggattacaggcgtgagccaccaagccctgctgcaggtttcttctttcttcttcttccttctcctccttctcgtcttcctcctcctccaccacaaccaccaggcccagcttattctaggtttttttttttcctttgagacagagtctcacttcatcacccaggctggagtgcagtgccacgatcttgggtcactgcaacctccacctccctggttcaagggattcttgtgcctcagtcccccaagtaactggaattacaggtgcgcaccaccacacctggctaattttttgtatttttagtagagacggggtttcacctcttccaggttttatgatggtgccctgcttaattcttcccaaactctgctgtctgaaacacccacatcagtgccctggcattactcattaatgagccagccactgtcccaggatcatgggttcttcttgcctcaagcctctgcattctcaggccctcagggcttcaggttttactaatttaatatcacacggactcctgatgactcctgaatataaaagtccagccaaggcagtgagctctggtcatgccactgcactccagcctgggcaacacagtgagaccctgtctcaaaaaaaaaaaaaaaaagaggcctggtgctgcagtggggctcacacctgtaatcccagctgggaggtggagatgggtggatcatttgaggtcaggagctggagacaggcctggccaacatggtgaaagcccgtctctactaaaaatacaaaaattagccaggcgaggtggtgggcacctataatctcagctactcagaggttgaagcaggagaatcgcttgaacctgagagatggaggttgcagtgagattgtgccactgcactcaagcctgggtggcaacagagtgagaccccatctgaaaaagaaaaaggaagaaaaagaaatccagccaggatcccttctctaactgtagacccagaaagccaactgcctcttggatgcctccttgcagagatgtcacagacacttcaaacataacacacttgaaatccagctcctaatcagccccccaatctgccccaccctgtgtgttagctttgtccttccaggtgataaggccaaaagaagtcatgtggattcctattcccgccacaggccatcacatcaacccagtggccacaccaacccagcagcaaatcttatcagctttgcctttatttttattttatttatttatttgtttttgagacggagtttcgctcttgttgcccaggctggagcgcaatggcgcgatctcggctcactgcaacctccacctcccaggttcaagcaattctcctgcctcagcctcccgagtagctgagattacaggcatgcaccactacgcccggctaattttgtatttttagtagagacggggtttctccatgttggggctggtctcgaactcctgacctcaggtgatccgcccgcctcagcctcccaaagtgctgggattacaggcgtgagccaccgcgcccggccgagatttgcctttatttttattttatttttgagacggaatttaactcttgtcaccaggctggattgcaatggcatgatcttggctcactgcaaccttcgcctcccgggttcaagtgattctcctgcctcagcctcccaggtagcttggattacaggcgcccactacacccagctaatttttgtatttttagtagagacagggtttcaccatgttggccagccaaagtgctgggatcacaggcgtgagccaccgtgccctgccagctttgcctttaaatcgtatctagaatccaaccatttctcactcctccaggaccccagcctggccagagccctcactatcacccacccacccacctggactaccaaccaggtcttcaagctctggccctggcctcctaagcctgtttctcccagagtggccaccagagggcgcctatgaacacccgagccaggtcacatccctcctttgcttagactcttccgtggctcccacagcacttagaataaaagttaaagtattctctgcagcccacaagtccctgaataatctccccaccctcatctgctttctttttctttttctttttttttgagacagagtctcgctgtatcgcccaggctggagtgccagtggagccatctcggctcactgcaagcaagctccgcctcccgggttcacgccattctcctgcctcagcctcccgagtagctgggaccacaggcacccgccaccacgcctggctaatttttttgtatttttatttttatttattattattatttttttgagacggagttttgctcttgttgcccaggctggagtgcaatggcatgatctcagctcaccacaacctccgcctcccagattcatgcgattcttgtgcctcagcctccagagtgactgggattacaggcgtatgccaccacatccggctaattttgtattttttttttagtagagacggcgtttctccatgttggtcaggctggtctcaaacttctgacctcacgtgatccgcccgtctcagcctcccaaagtgctgtgattacaggcgtgagccactgtgcccggccgcatttttttgtatttttagtagtgacgggtttcaccgtgttagccaggatggtctcgatctcctgacctcgtgatctgcctgcctctgcctcccaaactgctgtgattacaggcgtgagccactgcacccggccttctgctttccttttattttttgagatggagtcttgctctatcgcccaggctggagtgcagtgacacaatctcggctcgctgcaacctccgcctcccgggttcattctcctgcctcagcctcccgagtagctgggactacaggcacctgccaccacgcccggctaatttttttgtatttttagtagagacagggtttcaccatgttagccaggatggtctcaatctcctgaccttgtgatccgccagcctcagcctcctaaagtgctgggattacaggcatgagcgtgagccaccacgcccggccttctgctttcttattcactccactccagccactctggtccccttactgtccctccagcacaccaagcgaggtgtcatctcagggcctttgtgcaaactgttctgcctggatcttccccaggtacttacatggcctctccctcacctccttcaggtatctgcttcaataatgtcacttccttggtgaggcctcctttctgggcctttttattctttttttttttcgatggggtctcactcttgttgcccaggctgcagcaagctatgattgttccacagtggtggctcactctggtaactctgggcaccaaggtgagggagataaagtgggccagggtttagcccactgcttttaagaaaagcttagtggccaggcgtggtggctcactcctgtaaccccagcactttaggaggctgaggtgggcggatcatctgaggtcaggagttcaagaacaccctggccaacatggtgaaaccccgtctctactaacaatgcaaaaattagccagtcgtggtggcatgcgcaggtggtcccagctactcaggaggctgaagcaggaaaatcccttgaacccaggaggcagaggctgcagtgagccaagatcgtgccactgcactccagcctgggcgacagagtgagactccatctcaaaaaaaaaaaaaaaaaaaagcaacaacaaccaaaaaacaaaaccaccacacattcacagacacacaaacgtgatcctcacctacctctggttggtgctattggtcactcacattttagtaagaatgcaagccaagcttttctttctttttctttttgagatggagtcttgctctgttgtccaggctggagtgcaatggcatgatctcagctcactacaacctctgtttcccaggttcaagcgattctcccacctcagcctcccgagtagctgggattacaggcatgtaccaccatgccctgctaatttttgtatttttagtagaggaggggttttgccatgttggccaggctggtctcaaactcctgacctcaggtgatccacccgcctcagcctcccaaagtgctggggttacaggcgtgagccaccgtacctggccgctaagcttttcttaaaagcaatgggctaagcctctggcccactttctctccctcaccttggtgcccagagcacagccagggcagattgaacgcctttatttttctcaaatataaaatcagagtctcctgaggcagcacatgaactccagagagagaatcaacaacaagaatcacattgctaaaaagaacaggcctatatctacctcccgccctccctccccaccaatctgggagagggaagagcagagatcatggcctcaaagctctcgagcacctggctgaagcccagtgctgggcgccatgtgagctggaggaagccagggtgggtggagcccaggctggcttgattgtgaggtctgtcagtgcttgtcagtggggcgaaggttcagagatgccaggcgtcccaagggtccacggcgagaattggttgccagccgctgctgtgccaggaatgactgggcatgggcaggcgcccgctcctccccagctcgctgctgcaaggccatgcccttcaggaggaggtgtggttggggtcaggtgagctcacaggacccccccaccaatattctacccatgagatcttagagcccagaccccacacttaccatattataccaggcactgatgagcagcttttcttcctgctcccgctgacttcggcttttctcaaagtccatctgtcaaggaggcaagtgtcaggggcctagatacgttggaggcagcgtaaagggacgaggacacccacctccaggtgtcggatgcggacatcccgttctcggagctgtgtcctcagggaatggagttctggaggtgcccccgcagctggccgctgcttgggttccatggtctgcatgacctacaggttgaggaagtcatagccaggtgactttggccttgaaaccccctgggacatactggggtgtgtgtattcattcattctttcattcattatagagacagagtccccctatgttgcccaggatggtcttgaactcctggcatcaagcaattctcctgccttagcctcccaaagtgttgaggttacaagcatgagccattgtgcccatccagccagtactttatttttactttatttttatttttatttttgtgatggagtctggctctgttgcccagcctggagtgaagtggcgcactctcagctcactgcaacttttgcctcccgggttcaagtgattctcctgcctcagcctcccgagtagctgggattacaggcgcatgttaccaatcccgcctaatttttctatttttcgtagagacggggtttcgccatgttggccaggctgctctcgaactcctgacctcaagggatcagctgcttcagcctcccaaagtgctgggattagcggcgtgagccactgcgcctggctgtgcgtaattttttttttttttttttttttttttgagatggactcttgccctgtcgcctaggctggagcgcagtggcacaatctcagctaactgcaacctccgcctcccgggttcaaatgattttcctgcctcagcctcctgagtagctgggattacaggcacccaccaccatgcccagctaatttttgtatttttagtagagatggggtttcaccatgttggccaggctggtctcaaactcctgacctcatgttccgcctgccttgacctcccaaagtgctgggattacagccatgagccacggcacccagccagctgtgcagtattttaatgtgacaatcagtagcagtggggaatcatgcagaagtctgtcttatggtggggtatgacaggtatgagttgggggcacagatgtgcaagcaggaggtttgactcaataggaggcacaaaaagtaagaagccagggcaggcaacttgtgggaacacccagcgtcctcaccatgcgggccttgtccacgtagcggcggtatcgctcctccatggcccgcaagtccgcgtccttcttctgcaagttatgctgcagctcctcgatccgccgggctgctggcggaagaggtggcccatcagctccacgctgctgggctctgggatctccccaccctctggtcactaggtcctacttactgctgctgtcagtgggtggctccagctcctcaatgtactcccgcttcctctgcaactccagatctgcctcatgaagcttctgcctgtgggccggggatgagcagcagtgggctgacctccgggctggcttctcttttgtcccagtggtagccacagacctccccgccagccagaaatgcccctacatggccacagagccctctctgcctgcccctcatgcctggggctgtgtgccctggtcccaccggctccacagctgtcagagccacaaccctccgcacccttagcaggtatgccccggaacagcccctgctgtccacttcttcccatcccacagctcccaagctggttcagccaccatcttcccttgctagcttcttctactctcaagcactccatccagcagccagggatctttctagaatacaaatctcttcaatagcagacaggtaaaagaaaagaaagcaggccaggcgcggtggctcatgcctgtaatcccagcactttgggaggccaaagcgggtggatcatctggggtcaggagtccgagaccagcctggccaacatagtgaaaccccgtctctactaaaaatataaaaaatcagccaggcatggtggcacatgcctaagaaactccccactaatatcaaatccatgcccccacgaggagttccctctttctgcgacttacaaatgttcctccagcttccttttcagcaaaatggactgggagagagaagaggcaaggtgagtgggggatccagagaggccctaattcttccttcccagggtgagggtagggggtgccatcctgggcccatggtacttacaatggcctgtatggggcatcgggcagcatgggagagagaggagggttacttcggggcacaagggagggccaggctgggaggtggtgggtgacactcacatcttcagtcttgcccccctgctcctgcagggctttctgcaggtcctccacctgggcccgcagctcggatagctgctgctggttcagcctgcgagggtggggggccgcttagtgcctgtgcccacttttggccccctctgtccctgctccgcgcaggtaggtccccaggcgctcaccggtgctgcgtctccaacccgtggcgcgcgcggttggcatcctccaggtggcgctgcagctcctcctgccgctcccggtcggccgcctcctgcctgcacagccgcttgttctccagctgaagccgcaggagcgtctccctgcagacccgggaggagagagcagggccagggtcgagtcacctcgcaggctcgctggggctcagggagagtggagctaggggcgggacagagccctggggaagagcccagccagaccatggggttggagcaccgaggacctactacgggttcaggttcccggcccagggttaaagtggacggagctctaagctgggatagtgggtggggctaggcaggggcggagctacaagagtggattcgaacagctgggatgggactgctggaaagcgggaagcagaaatgggaagaactaggatgggacagtttttcggggtttttttgtttgtttgtttggttagttttggctttttgtttgtttgagatggagtctcgctctgtcgcccaggctggaatacagtggcgcgatctcggctcactgcaacctctgcctcccaggttcaagcgattctcctgccccaacctcccgagtagctgggactacaggtgcgtgccaccacacccggctaattttttgtatttttagtagagacggggtttcaccgtgttagccaggatggtctcgatctcctgaccttgtgatccgctcgccttggcctcccgaagtgctgggattacaggcgtgagccaccgcgcccggtcgtttttcgggtttttaaatcatttttattttgtagagagggccactatgttgcccaagctgctctcaaactcctgggctcaagtgatcctccagcttcggccttccaaagtgctgggacttagaggcatgatccaccgtgcctggcccggggtgggagagttaatcccggcagggcacaggggactgaaactcacagaggttacactaacaggggtggacgctgggggaaaggatcaaagtcagcggggctagggcataggatttttgtgcaggaactggagccaggtgttggacataatttgtgtactaaggatagacccttgagaggcaaagtcatctggtagggctggacagagccaaatcaggagtaagtgggcctaggagcccggctggcacctggagctgagaccaagcaaccggggctagcagaagatgggagggcgggagcggggctgagggcgggccttggcaagcctgggtggggccagagttttgagtgaccccaggatacctgagctccgcaggcaggatctctgcggctaagttatccacgggtgtggaggtgggatccagtgagggatctgaagaatgcgagaaaagtcttcaggtctcttcgcatcccctgtccccgcccctagggtcttcttcccaaggatcatcttttggggcttcaagttcagccaacagtctggcttgacacaagctccatccccggcttgatagagaaccgggagggttggccaagctttttagcctttgctccaccctgagaccctgagcctctctcttcaatttgaccgtgtcacctctttctggtcacctccagcctggcctagctctgtccccaacctagacatgcactgggacacaacctgttctacccaaacagtacaccaggacaggtaagaccccgggatggggcttcatctcaccggcctgggtcaacccccgcggctgcagctgggcgcagcgcagctcctcattggcctcccgcaaggagtcccgctccgccaacagccgctgcagggacagggtacaagacactccacgggtcaggctcggcctcctgggaaatgggctaccccagaattggcagggtggggcttgggcagtggaacctcagcctcacctccttctcctttgtcaccgactcatacttttcctccaggttgcggcattcaaatagccatttctcggccttcatggcctcctcctgccgctggccctgcagttcctgcacctgaacacagagaggggaggaataaggacagcagggctgggagcaggggcaggggctgagtacaaatggtccccgatccaggatgctttgacttattatttttttgactttactatggtgctttcagctgtgtatgtttttgcttgttttttttagagacagggtctccctctgttgccctggctgatctcaaactcctggcctcaagcagtcctcccacttcagcctcccaaagcactgggattacaggtgtgagccgttgcacccagccgactgtgaatgttaatagtaggaacccatacaaccattctgtttttcaattgcaatgaattagtcttcaataaattgcgttatatagtcaacgctttattataaaataggctttatggtagatgattttgccaaactaggctaaggtaagttttctgagcatgtttaaggtaggctaggctaggctgtgatgctcagtaggtaaagtatgttcaatggattttcttttttaaaaaaaatttaaaaatttttattttttgaaaacagatggaatctcgctatcttgaccagggtgttctcgaactgctggcctcaagcgatctcccatctcaacctctcaaagtgctgggattataggcatgagtcaccacgcccagctctctttttctttttctttttttaatatcttttacttttttcttttgagacagtctccctctctcaaccaggctggagtgcagtgatgcgatcttggcttactgcaacttccacctcccaggttcaagctattctcgtgcttcagctttctgggtagctgggattacaggcgcgcgccaccagcccggctaatttttttttttttttttttcgagacggagtcttgctctgtcgcccagcctggagtgcagtagcacgatctcggctcactgcaagctccgcctcccgggttcacaccattctcctgcctcagcctcccgagtagctgggactacaggcgcccaccaccacgcccggctaattttttgtatttttagtagagatggggtttcaccgtgttagccaggatggtctcgatctcctgacctcgggatccacccgcctcggcctcccaaagtgctgggattacaggagtgagccaccacgcccagactaatttttctatttttaagtagagacagggttttgctatgttggccaggatggtctcaaactcctggcctcaagtgatgtggggttacagaaggagttatggggtgcccgccttggcctcccaaagtgctgggattacaggcgcgagccaccgcacccggtctttttcttttgtttgagtcagggtctcaccctgtcacccaggctggaatgcagtgatgcagccacagctcactacaacctcgaaatcctgggctcaagtgatcctcccggctcagcctcccaaagcgctgggataccaggcctggcctttatgcattttaggatattttcaatttaccacgagttttgttacatggttaggtagccccaaggaaatcaagcagcatggtgaagcggcgggcatcaaagaatttagaggagcggtacttaagggaagggaaaggctgggcttactaacccagacagaagagcagcgtgggtggagggaagaggcccggagagcgtggcctacgtacaaataagggaggggatcaggggtgggcggagggctggccaacggtgagagacttgctgccaggggcggggccccggccctaaccccgcccccgccgcacctgccgccgctgcgcctccagctgggcgcgcagggagcccgctcggcgtagctcatcctccagttgtcgcgtgcgctcggcgtggccggcgttgcgttcctccagctgccgcacctgccgccgcagctccctcagctcgcccaagcggcgccggcaactggtcagcgtggcctccagctgcccagcacgctccgaagactgcctaggggagtgggagggaagggggagggctgagagctctgatcaggggtcagctgggatgtggagtggcccttggagcacagggtgttgttcagcctgaggcttttgggttcaaggtgaaggggtcatgaaagttgagggttaggggtcaatcagggcctggagctgttgagagtcattacagcaatggttagcccagggttataatcaggtatcccctggggtggaattgtggggacacagagggtggggttatagggggagtgatggggagcctagagaggtctgagcatctgccaaggataccttggagtcattgggggaggtatgggacaagaggactgcggggtccttagaagtgcaattggggggtgcactagtaccttcgcattacagagatgctataggggcccagtggagccctttgtggttacagaaggcacagtagagtcaaaagggggtgcaaagtaattgcattgtggagtcctagaaggtaccatgggatccaggggcattatgaagcccaaactgtgcagtgggatctgcagagcattgtaggggaggttcttgtgttttggggggccacagggatgctatggggtcttggaagcatactgtgggataaggggggggcagtgtggggtccaggggatatggtggaattcaggatagtgcaatgtggccttgggcgttctgtagggctcagggtggcactgtggagtccagggggcatattgggggttcactgggcacatgaaaattacagagctgctatggcatcagaggggaactctggaaacaggtttaccccccgccccccgtgatggggacccaggaacccaccactcaccgtagttcatccatctcatccttcagggcctgtgcctcctgggccaggctagtcagcgcctggttccggtgctgcagctccgcaacctccctctccagctcggcacagcgcaggcgctcatcctccctgccactctccagcctgggggtgttgggggaagagcacatgagggggctgccctcccccggtcccctggcttgcctggcccagtccccagctgaccacacctgaagttctcctcctgcaactgctccagctgggattgcagcagcagcagcttcttggcagtgagacctggggtaccctcgccttcaggccggcccatccgctcccgcagccctgcattctcttgcgccaggctctgcttctcctctgacaggagcatcagctgcgggcagggcagaaagatgagcttgggcttggagaggggctactcaagtgaccctgccccacctagggccctacctgccgctccagatccagacagcgctgctgtaattcgtccccctcctcagcctcctcacttaggaaatagtacctgcgggactgcagagatgagggggaagaggaactcagggattcaggagaaggacggggggagggaggctgagatctctagaggccaaatggagggggccaagaaaccctcaggattgaaaagagggctggcgccgggtgcagtggctcgcgcctataatcccagcactttgggaggctgaggcgggtgggttacctgagatcaggagttccagaccagcctgcccaacgtggcgaaccccttctctactaaaaacacaaaaattagccgggtgtggtggcgtgtgcctgtagtcctggctactcgggaggctgaggcaggagaatcgcttgaacccgggaggcggaggttgcagtgagccgagatcgtgccactgcactccagcctgggtgacagagtgagactccatctcaaaaaaaaaaaaaaaaaagaaaaagaaaagaaaagaaaacagggctggggttggagactgaaggaagagcgattccagaacactggagacctggtacaggaagtggctagcaccctggaagatgggcgtggcttacaggcttaaggacaagcccctcccccttaggctaccctgagcatctgtaagtggggtctggacctttaacaaggttaagtcacaaggttaatcacagcaaacttatccccaactcccggcctttggatttgctgatccctgtgcctggaacacctttcccccaaatctcttacctggctgtcaaagttgccatacgtctctggtgacagggagtcaggagtgtctttggtcatgagctgaggagtgggaaggggcattgtaatgaactggatatctgaggccagccttcaaagtatctactatccaacctgagaacctctccatcctcccgtcaaggccagttctgcccaataaccccagcccagaggctgccctcctgcctccaacacagagggaagccagatcccttgagcctgctagattgcgacttagagctgggaggagctggcagacacatgagacagagatgtctggccagctgagttccaggcagagtccagaccttaccagggcaggacctgtgcccagttctctctgccctagagatgtcccctctcctgacattttccaattgcacactgagtgcccccacccacctcttggatggcttccatcaccacatgctgaaccgattcttccagcgtcatgattctctggatgtggtctggggatcaaggtgggggaggctgagacccaggggtgaggtggggaggaaggaggatttcctcaggccagccctggggaccccctaagctccccataccctgctttttctcgcaactgatggcacagcccagcaccagctgaagcagcttgccgagctctgccgggtctgagaactctccaatgaggctcacatctgggagatgctcttctgacacaggatgcgccaggacctggggagaagggggtgtcaggggctcatgggcccacccttctcccaactcaaccccctgaatccctttacagttactcacatcctgggagtactctactaggctccgtaagaccatcttcagattgctgacctagggaggaacaaggaactgtggacaagttcagaggcctcccactctgaatctgtaggtcccatcctctctccacctcacttctccttccctgctcatctcatcctattctgtctgcgtgcgccttcctctaggggtgacctgtctggctgtctgccccttttgtctgcctgaccatctttgtttctttttttttttttttttttttttgctttagctttttaagacagggtctggctctgtcacccaggctggagtgcagtggtgcaatcttggctcactgcagcctcgacctcctggggtcaagcaatcctcctatctctgcctcccagtagctgggactacaggcatatgccaccacaatcgactacttttttttatttgtagagaggaggttttgctatgtagcccaggctggtctcaagctcctgagctcaagcaatcctcccacctcagcctctaaaattgctgggattacaggcatgagccactgtgcccggcctgcctgaccatcttccttcatatgtctccagaaccaagtcacttctcaccacctgccccaccatccttcagccctacccatccatctttacctctcacctggattagtgcaccagctgcctctcctcttccacttttgctgcctacattttatttctctccatgcagccagggggagctttataaagcccaagccaggttgcatctttgctctgctaaaaccctgccttgactttccacagcacttaaaaatagaatccacacccccaccatggcctgccaggcccctgatgacctcatctcctacaaatcttgccctcttgctctgttctgccctctctgccattcctccatcacaccaagtttattcccaaatcacggcctttacatctgctattccctatgcctggaacaccgttcccccaaatttcacttggagattaacccatctgatgtaatcagccacctatgccctcattgctctctctcaaagccctgcttttttgttgtcttcacagaactactggcatcaaaagttttttctttttctttttctttttctttttttcttcttcttgagacaagagtctcgctctgttgcccaggctggagtgcaatggctcaatctcagctcactgcatcctccacctcccaggttcaagtgattctcatgtctcagcctcccaagtaactgggattacaggtgcacaccaccccacccagctaatttttgtatttttagtagagatggggtttcaacttgttggccaggctggtcttgaactcctggccccaggtgatccacccactttagcctctcaaagtgttgggattacaggcatgagccactgcgcccagcctggaagttaatttttatggttgtgtatgtgttgcttgtcactagaatgatggctgtgtggggcaggtttttgtctgtgttattccttgctgaatgcccaggcctggcacagggtgagtactccatagatgaatggatgaacaaatggttgatcaccagacatctgtccctcttcctgcccatcacccaggacatgtgcctagctggcccgtccctggtcatctcttcaccagtctgtcctctaatcaggagtccacttgtcaccttcagcttccagttgggacctggatcttccgagatgccctggagccatgcctcgttgaaccaggaggggtctctgggggcgagaaggtgggatgagcagactgggggacacttttgggatcctccccttcagctccactcacatctggttcagcacataggctacggcaaggccgctgctcaggtcctgagggctggcacagggagacggaacgtggaacgtctgtaactgaggggtaaaggaaaggacaaggaaagagttagggcctgggagcgccgaaccgctccccttttgcagacttttccagtcagcgaacctcacatggtggggcgggcgctgctccgccacagcagctctgcgagggactggcttctgctcacctgagaccggagggggcgtggcctcacctcacctctgcccaacaaaccctgcgcgtccaggccagggtggtatcgcgagtcacctgggccccacaggcaccacgtgaccaggccaattcacctgtgtcctcgccccacgtgaaccaaccacagaggggcggggcctcacctgtcctttccacgcagacttgccacgtgacgggggcgggtgctcgggccagagtccaacggtccagcaagtcgacgaccccgcacctcccagccccagcaccaagagactgaccgaaccagggccagggatcccgggcaagaggagcgggcgctcaccttcccctagccccgccccacgacctacccaggtgagcagagacccgcatagctcagctttgtccacgctcatggctcccgatcggattcaatccaggccacggagccccggcgccgcagcagcctccgggtccgccaccagcgagcgcccgcagccccgacctcccgctcggcctagagcgccgccccgccccgcccccctaggcgcaggccccgccccgcccccaagcccaggctccgcctcggaacgtaatctcctccctacgcccgctcttgcctccagccccgccatcttggatccgggcaccgttcgggcgcccgccctgccgctaggggtcagcctggcccagccttgtgcatccgagggtggtcccacctcccatcctcgccctggccctttttggggtgggaggtcctcaagatccttttgagacggaggtgctccaccctgttacacaagcgcattcacgtcttttccctgcaacttaagtaaattctttttttttttttttttttttttgagacggagtctcgctgtcgcccaggctggagtgcagtggcgcaatctcggctcactgcaggctccgccccctggggttcacgccattctcctgcctcagcctcccgagtagctgggactacaggcgcccgccacctcgcccggctaattttttgtatttttagtagagacggggtttcaccgtgttagccaggatggtctcgatctcctgacctcgtgatccgcccgcctcggcctcccaaagtgctgggattacaggcgtgagccaccgcgcccggccttaagtaaattcttgtgtctaaccactttataatcggagccgttgtgcggggaggggcgagccctggcactttctatggactgggagaggggatgctaaaggggttttcccgccggacgcggtggctctcgactgtaatcccagtattttgggaggcctaggagggagaattaatttggatagaagttggagaccagcctctcttcaaaaaatttaaaaattacccaggtagcggtggctcacgcctgtaatcccagcactttgggaggccgaggcgggcggatcacgaggtcaggtgttcgagaccagcctggccaacatggtgaaaccccgtctctactaaaaatactaaaaattagctgggcgtggtggcgcacgcctgatttcagctactcgggaggctgaggcaggagaatcgcttgaaccctggaggcggaggttgcagtcagccgagatcgtaccactgcactccagggggcaacagtgcaagactcctcaaaaaaaaaaaaaaaaaaattagccagacatgttggcgtgtttctgtggtcctagctcctagctctacagaggctgaggtgggaggatagcttgagcccaggaggtcgagactgcagtgagccgtgatagggccactacactccagtctgggtgacagagcaagactctgtctcaaaaaaaaacagtaaaaatttaaaaatagggccgggcgcggcggctcacgtctgtatcccagcactttgggaggcctaggcaggcggatcacgaggtcaggagatcgagaccatcctggctaacacggtgaaaccccttctctactaaaaatacaaaaaattagccgggcatggtggcacgcgcctgtagtcccagctactcgggaggttgaggcaggagaatagcttgaacccaagaggcggaggttgcagtgagccgagatcgcgccactgcactccagcctgggcgacagagtgagactgtctcaaaaaaaataaataaaataaaataaaataaaataaaatgcctggcgcgatggttcacatctgtaatcccagcactttgggaggtcgaggagggaggactgcttgaacccaggagttcgagaacagccctggcaacacagcgagactccgtctctacaaaaataaaataaaaaataaaagtagctgggcgtggtggcacgcgcctattcccagctactccagaggctgaggtgggaggatcgcttgagtccgggaggtcaacgctgcagtgagccgtggtcgcgccactgcactccagcctggacgtcaggggggagaccctgtttcaagaaataaataaatgaatggatcctccctgcattattgactccagcagtagataaggggacacgggtatggtcctaggtcgagaagaggtcagttagacacacatgtcctggctgatggataggcacccttgcccagcctggatccgtcttccacgatattccccccgcgccttgccctccccagatgcgcgcccggcatcacccccacctcagaacccaggatttggctgaagctgccgcgtcgcccgggcccaccagggggcgcggagaccgcagaacgcggcctagggggaagactgtgcgcccgccctgaaaccccggctggggcggtggagcgggggtcaatggaaagtgatgggaattatagttaacaataaattgcagtcaccatgtatggagtgcttactgtatgcagtccttgcgctaagcgatttaaatacatagactattgaatcctccccatgtctccagatggcaagtgctgttttaattccctgctttgccggcgagaaaacagaggttccgagtggaccgggttttgaggggaagggtgaagcccaggctcgcgccctgtgaccccagggtccctctgcaacccctccccggtagacgggcggggtaatgtgcactaattagaggttattagctgtacccagagggaggggcgggctctgcattgggggcgggcccagatcggaggggaggggcgctgctcccacccacccagaagatcctggcgccagagaccttgccccggagcagggtgggcaaagtgacagctgctccccgcgcgcatcgcacgaacgcagtcactcacccccagacacccgattacagcccactcatgcgcagccgtacgcacccgggggcctcggatgctcgtccatatccccacaacctcctcccgcgtggttttccagactccagcccctgggagcgggtggagaggatagtgggggaaggggacaagggccggcagcgctggcttccggactgggctgtcttccggcggtcgtgggaacagctgccgttggctccccgacctcgcattcaccagaggagagggtgctgccaatacagggaaacagggccaccccgttcccaggtagcaatgggaggtgagccaggaaccacagctgttacaagcatgggtggctggacatgctgagatcaccacattagggcgggggtcgcagggattttgatgtttaggggaaatctggaaatccaaatatttaggcaaattgacttaaattgtgctaatgttggcgtgatgttgtgggcgtcccagatgttcggggagccaggagtccccagacttaaggaaaatctgggtgtgctcaatttgggggaggagcataaccctccattttgcggcggcagggagtcccacatttggggaaaagcagtgagcttctatgtcggcggggaagacagcagcaatctctgttttgaaacacagggagccccgctgtgcggagatccaggcacctttaattcagcaagaggggctgaaaaaccctccacattttggaagaaggatccaaacccctgttttaggtaaagagagcccccaacgttttgggggatggtctgaaggccgccatttgtagggacacagagccctggtgtgcaggtctgggccagcagcccccagctggattggggagcccaccccctctactggtttccaggaacagctgggcccagcctaggttgtactgctgggaagcggctgactcaacccctccctgtggccacagctggaccccggcctgccccctccagcgttcacatctgggcagggatccagtcttcatcagggctgagaaggggaccctcagtcccacaactggagaacagtgcccctctgccactcccctggctgaccacagccactgggtggactccatgcatcatcaccatggaggactctggcaggccccctacagcccagatattgacatcctgccaggaactcctagccagtcccccctccctgtgtctgtgtgtgtctgagtccatgtgaaatgtgctaggtttttttgtgtttttgagagaaagggttttgctatgttgcccaggatggtctcgacctcctgacttcaagtaatcctcctgcctctgcctcctaaagtgctgggatttcaggcgtgagccacggcgcctggccaaatgtgctggtctttgtaggtgtgagatggaggatctgtgactgtgtgtacacgggcatgtgtcctgcatccattgtgtcataaggccttcgagtttgtgcaacaggctgtgcctgatttgatgggggggagggctggtttcggggactgggggaggggaaatttgtaacatccttgtcggtaacatccttgtccgtaacatccaggttggggccgggcttggtggctcgcgccagtaatcccagcactttgggaggtcaaggcagacagatcacttgaggtcaggggttcaagaccagcctggccaacatagtgaaaccctgtctctactaataatacaataatcagccaggcgtggtggtgagcgcctgtaatcccagctactcaggaggttgaggcaagagaattgcttgaacctgggaggcagagattgcagtgagccgagaacgcgccattacactctagcctaggtaacaaagcaagactccatctcaaaaacaacaacaaccaaaaaaacccatccagattttagggtgactagggaacctctagtgtgtgcccctgtgtatctctgtatggtccaggcagagtttgggtggggctctctcactccaattgcatcttcatgtgttgtgtgtctgtgtctactatatacgtctatatgggacctcactttgggtctatatctgtgtcattctttttttctttttctttttttgagacggagtctcactctgtcacccaggctggagtgcagtggagcgatctcggttcactgcaagctccgcctcccgggttcacaccattctcctgcctcagcctcccaagtagctgggactacaggcgcccgccaccaggtgtggctaattttttgtatttttagtagagacgaggtttcaccgtgttagccaggatggtctcgatctcctgacctcatgatccgcccacctcggcctcccaaagtgctggattacaggcgtgaaccaccgcgcccggcctttttttttttttttttttttttttttttgagacagagtctcggccgggcacggtggctcacgcctgtaatcccagcactttggaaggccgaggtgggcggatcaggaggtcaggagatcgagaccatcctggctaacacagtgaaaccccgtctctaccaaaaatacaaaaaattagccgggcgtagtggcgggcgcctgtagtcccagctactggggaggctgaggcaggagaatggcgtgaacccgggaggcggagcttgcagtgagcggagatggctccactgcactccagcctgggtgacagagcgagactccgtctcaaaaaataataataataataaatataaaaataaagaaaaagaaggctgggcgcggtggctcacgcaggtaatcccagcactttgggaggccgaggtgggcggatcaggagttcaggagatcgagaccatcctggctaacacggtgaaaccccgtctctactaaaactacaaaaaaattagccgggcatggtggcgggcgcctgtggtcccagctactcgggaggctgaggcaggagaatggcgtgaacccgggaggcagagcttgcagtgagccaagatcatgccactgcactccagcctgggcgacagagcaagactccgtctaaaaaaataaaatataaaaaaaataaataacgaaaaagaaaaagagacagagtctcgctctgtcgcccagtctggaatgcagtggcgccatctcagctcactgcaagctccgcctcccgggttcacgccattctcctgcctcagcctccccagtagctgggaccacaggcgcccgccactacgcctggctaattttttgtatttttagtagagacggggtttcagtgtgttagccaggatggtctcgatctccagacctcctgatccgcccgccttggcctcccaaagtgctgggattacaggcgtaagccatcgcgcccggccgtccacttgacgttttgagtgtccctgtacgtggtcttgtctctgtgactgtatcccatttcgtgccccctatttgtggtaacaggggtcatgcgatggcatgactatcttatgtgtctgtatgtatctctgtgccaccacaatcaccatggaagaagtgtggctgtgtgacaaaacaagccctggtgtgcaaaactgtgtccctccctgttcctgttttttttttttcttttgagacggggtctcctgtgtcgcccaggctggagtgcagtggcacaatcgctgctcagtgcagccttgaattcctggcctcaagtgatcctctcgcctcaacccccacatacctgggactatagacacgactataggcatgcaccaccatgcccagctcattaagaaaaaatatttttgtagagacaggggtcttgctatgttgcccaggctggtcttgaactactggcctcaagcgatcctctggccttggcctctcaaaattctgagattacaggcctgagccactgcgcccgtcctattttgctggatggggttgctttatcaggatgtatctgccacctacctatgtatgaatatggctctgtttgcgtccctatcacaaacgctatgtgactgacgtgcctgtgtgattgtctgcgtctccatccacgtgtgtccgtgttcgctgcgaggctggctggactagaatgggttggtgccaagatgtggcaggtgtatcctgcgtccgtgtgacactgtgggtcggggagtttgtttgtgactttgtgtgtagggggcgggaagtgggagtcaaagtcacagaggacagcaggctgcgcggacgcagtgatgtgcgcagagggcctcccgccccgccgttcccctccgggaggcgccctccccgcgttgcgggggcgcgtgcgtcgtgcgtgacgtgagacacgacgggggtcgctgcgtgcgtggaacccgacgcggtcgtgcgtgcaagcgcggggggtggaagggcgggagctctgcactggctgcgtgcgcgcgtgcgtgggcggtggcgggggctgggcgagcggaggcgcgcagggcaggaccagccccgccccggccgggaccttggggcgccggtgaaacccgggagggggcctccgttaaccccttcctgcccgatccgaaacttgtggcccctcgaccgagcgcccgggggcttccccagcgcctgacgggagggcagtccctgttgggggagggacctttcccatggagctgagaccccccccccagttgccatgggaaccagagcttcccgcgtagccaggcgcgtgtttcctttccccgcccagccatcctgcttttcctccagctgcctagtctactgacaatgcgcttcccgctcgtgatcccgggagaagggggctggggtcagcgtcgcccgggcgtgcgtgactcaggccagcccgggggtcccctggccgcagctggcctcgctcccgcttctccgcccccgtgactcacccctcccggctttccccgcgtgtgactcaggcccctggggagggggctgcggagtctgggacccctacagacagtggggccgagaaccaagttctggggacttcgctctccgcggggaaggcctcccccaccagcgagcatccgagggccagcgactccccttagcaagccagaggcgccccccccaactccgcctctgaattggtagaccccccacccccacccctgcaaacctccgggaacccagcccccaacccctcctcccagcccacaggaagttttggcagagcccgtcgcggcgatgaaacggttaaagccgttttcttattcatttcatccaggggcccattttgactcagagcaagccggcgcccccctcgagcctggcctcctgggggcctgggtgcatactccaccccacatgtaccatttttagagaggggaggatggcgcttggtgagctggctgggggtcttgggtagcatatagagctgggttcaaatcctgtctctgccctcattgctgcctggacctcagtttccccatctgaaaatgagggatcattatgtccagcttgttgggttgttgtggggattaggtgaataatagatgggaaactctgcatccagggttgagcacgggagccagaagagggctcctcctgtttctcaggcctgggtgtcagggtgcccagcagaagcgagtccttgccgggcaggccatgccccacccagacactctaaggccatggggttcatcttgtccaccccctgcccgaggcaggcacccaggaagtgagaggcggggcaggaatgaggcacaacctgttgggcccgtcacctccccgccccccaccctcattccagtgccctgagagggcccccccacgctgcagccccacccccgccgccctggacgcctgggtcctgacccgcgggtggcccgagggaggggacgtcggatggagactgtgtctcgggaacatcctgtggactgctggctggacagacggaggagggtcagcccctcccggggcagggcagacattgactgggggcagagtaaacatggcccagggtgaccagacagggggcgggcggggggctgtaggaatgtacacacagtcaccccgagagagccagtccagacacacaaacccctgtcaccttggccacagagagactgccagccagggacacacagacagggtcagacatacagctgggtaagatgatccagcaatgactgtcacacatggacacagtgacagaccagaccctcaagcaagagacacacaccgtcaaacacatgaacgcatccactggtcaaaaatacgcaggcaggccgtgtgcggcggggataaatcaacccagcacataagcatgatagacacaaacacacagagactgacattcaggtgagaggcacacagcaaggcagacacaatggcgtgtgacacacatggagacaaacacaataggctagaaacataggggcaagacagacacagagtgaactatatgtgagacaagcaggcaacatgtgcatgctgataggagagacagtcactttcagcaccagcaccccgagagccacacgagagatatgcagacacaggcatgcactatcagatcctgacacgcaagagaaggcaacacacacacaccccagatctccaactcagaagatagagacaagacaagagagacaaacctagggacagagatgatgtgttcacagtatggcagagagtccctggcaccctggcccaccactgttgcacacacatcagagatgctcccagggacaccaagccgaagccttagaggtacacaccatctcaccaggaacacacacatgtgggacctggcaacagattgggtagatctgggcagactgacacattcacagacatggtctggccagacagtcacacccagtgcagagaggcacagacaggccacagtgggacattcataaacacatcggcacagaaagaccatgacaaaacctgtttgcacacacacacatgcacacatacaaacggagatcagtaacaggcaacatacagatcagccacagaacacacacatggaaacaagccacagacctcacacacagagaccacacacacacaccaaacacaaaccagccacagacctctttttcacacacacacacacacaccagatcgtatacacacatacatacagaccagccacagacctctttttcacacacacacaaatgcacattacagatcgtatacacacagaccagccacagacctcttttacacacacacaaacagatcatatacacacatacagaccagccacagaccacacacacaaacacacatacacaccgacacaagttagccataggaactttgaaacaacctacacgtacatacatctagaccatgtgcaacccatcctatagagctcacacacacacagagtggaacagaactctacacagataagccctacatagacctttgcatccagggctgggcacagaagcgggcagagggctactcctgtctctcaggcctgggtgtcagggttggaccagcacacactctcacatgcaccctataggccagtcacacgcttgccccctggaccttgccaaggttctgtgggggcactggacaccccagtctgtctctgccccacagagatcctggcacttcctctctccaaacatcacccccacttccctccctctttgcttttgccacttcccctaggaggcctagctcagcagcctctgctcctgctggggtgggggcctgctataaagaggtcacccagggtcttggtgatgcccaggtcccccaaggcttcaccagcagtggcagggatggaagcagcttcctgagaaactcccctcatgcccaaccatgtcagcctggagagagagaaagagagagactctccttcctgcttccaagaaaacctagcagcttcctctccaggagagggggcaaaggacccccaaaccacagaggtgggagagggaggcggctggtaggccaggagttcctgggggagggctcctgccgggcctcagatccacacccaggggcagggacacgggagggaggctgggtgctgtgtgctgcgatttgtgggttctcgccctggcctgcccactggctgactcacaggcagcccccagcccagtttcctagtgagggccccactggtcagtggggccagcagggaggggggtcaccgggctatttataagaaggagaagtccctcgtgccaagaccaaaagccccgaagacacttgtgggtgggggtgggtgaacttcctccttatcctgtgccctaggccccaggccctggggcactggggaagcctgcgcagggacttcttagccaggtgctggtctggagcccagggcctgggcagtacccagctgccagtctggacgctcaggccagttgggggagggggctgttctcccaccctcctcgtggggccggcctggcgccagtggggcggcttgagggggtggtgcccaggccacaagggtgacactggcagaggcctggaaccggctgtaccagcttggctgggcccccgccctccctgtctggcccaatctccaccccgtgctcaaacacccatgcagagtgtttggaggaaccctactcccacatgctggcctgtccacagagacccgtgcccctctgtctgtgccccaccacatttctcccccaattaaaggagaccctcagtggggtgcggtggctcacacctgtaatcccagcactttgggaggcccaggtgggaggatcccttagggccaggacttccagaccagcctaggcaacagaatgagaccctgtctcaataaaatataaaaaaataaaacttagcagttgtggtgtgcttgtagtcccagttactctggaggctgaggcaggaggatcgcttttacccaggagttcagggctgcagcgagctatgattgtgtagctgaactctagcctgagcaacagagtgagatggtcttgttttgttgcccaggctggagtccagtgtcaagatcatggctcatgtgatcctcctgcctcagccttcggagtagctggaactacaggcacaccctcctgacctcagctaatttttaaatttttttgtagagatgggggtcttgctgtgttccccaggctggtctcaaaaatttctgggctagggctgggcgaggtagatcatgcctgtaatcccagcactttgggaggctgaggcgggcagataacttcaggtcaggagttcgagaccggcttggccaacatggtgaaaccccatctctactaaaaatacaaaaaattagcctggcgtggtggcatgcgcctgtaatcccaactattcgggaggctgaggcagaagaatagcttgaacctgggaggtggaggttgtagtgagctgatattgtgccactgcactccaccctgggcgacagagtgatattttgtctcaaaaaaacaaaacaaaacaaacaataaaaaaaaactcctgggctcaagtgatcctccccctcggcctcccaaagtgctgagattatagacgtgagccactgtgtttggccaaagtgaggttctctttaaaaaaacaaaaaaagggccgggcatggtggcccacgcctgtaatctcagtactttgggagactcaggcgggctgatcacaaggtcaggagttcgagaccagcctgaccaatatggtgaaaccccgtctgtactaaaaatacaaaaattagctgggcatggtggcatgcgcctgtaatcccagctactcaggaggctgaggcaggagaatcgcttgaacccaggaggcggaggttgcagtgagccaacatcatgccattgcactccagcctgggcgacagagcaagactccatctcaaaaaacaaacaaacaaacaaacaaacaaaacaccaaaaaaagaggcccttcatgagacggcctgcagctggtactgcatacatgcttctctggttgtcattattcacaacacagtggctaatgctctgaagccagacagcttggattatatctcaactctagtgcttctagctgttggacaccagacaagttccttaatctcctgtggctcagtttctcatctgttacatggggatacaaataacatgcattttgctggattgttggaagcagtcgatgacttattttatgttaaccacttagaagagtgcctagcccacagtaagagccatgtaagtgttggctattaaaataataattattatttctcagcctatctatcttaagtgtttctgagtctcactgtctgcgtgacactaaccttgaacccatttgtctctctgggcatctctccctgccctgcgcccctgcccccatacacccactgttccttgccctcctcctgggatggactctgtctgggatggcctcacctctctctaggactccctctggcatggccagcctcagccctggccagggctgaattactgtggcctcctggcttttgggacctgcaagttagcttcccaaggtgctgccctctggcctgccctgccctgcccaaccccccaacgctgcccgctgcgcccccgcggggcccagccagatgtcagctgcagttattagcctgggcgggagacacaggcctggcagtgtgcctgccagactcacaggcctccggaatctcccttgagcctggggagggggaggggagccattcaagcaaggggaagaagggagggggcatttaggggtcacagggaccctccaaggacgggacgcccccagcttctgctgggaccttcctccagcaaggccactgcactgctggacttccccctgcccccacatagctcagtttctttttcgcctctttcgttttccttctctttcccacacttggtgagatctaggctgccccggaatggctgtttaacccctatcccttagcctctttctaccctaaagaagagagaggctctcttcatcctccagaagacagaggcctgggaagctgagagagagagagagagacaaagagagagagagagagacagagacagagacagagacactaggcttctcacctcttggtctagtgggttcacacactaactgctcggaagtcccaccttaagtctaactggaagcctgaccgtctgcacctcgccgcagcccttcccgggaaggggctctgggttccctcatattctccccttagattttcaggtcttctctgactcggggagggaagctctcagatgacagagctactctagggaaggaggggggctccctctaggtattctggatgatagtaggatgggacctgcagactaaaacgagagtggggcccctgactcacatgagtgagtggggggtgttggggacggagctccagatctcctggcagaagggaagggcaccccacccgagggaggaggcagccgccgttccagcccgcccaggcgccgggggcgcctcgaggcatcggcccgccctctccgcgccccgtcgggccgggggcgaagtccgacccaggcccgcgggcaggcggggacctgccgggctgggttgggccaggccgggcctggcaggacgcagccccaaagcggcggggtggggcggggccgggccaggcggccgtgggggccccgggggcggcggtcggggctggtcgggactagcagtctgggggcccaggcgcgccctgggacctggcagatagtcgggttccccgcttctggctcggggccccaggacagcgctggtcccacctcttcctgtgccctaatatgggcggcggggagagacttcgggggccggcccgcgctcagtcctgcccgcggactcccgcctgttgccatggcgaccaggccccgctcctcggctgcgtcccccgccgtcgggccaatggaacactccccaagccgcctgcctccgcggtcccctgcaggcaccgcgggcggaaccattgcttgaggggagaggatggtggctggaggctgccgcggctgggcgggctccaagcacccgggcctccgcgggggctcgcacgcccaggttcctcttccgaggcgcaggatgcggcgggacccagggcggggcgcacggtcccgtaggatccgagtgacggagacagggccgggctccttcccccggggctgttgccacacttcctgcctctgcgctctttccccagcctgtttctaaggaagggagtggggttgggcgaccgcgccccagccgtcgggctgggtccaggctctaggagccgacacggtgttgggcaaagcccagggtcaataggggagggttttaggatgggggacagagaatacagatgactaagaggttaccatcgagggggagcagcagtcgtggaagatccagcagtcctggtgcgcgggaccctcaaggccccctcctcacatgtcaactgagtaccctcttattgtcttctctgctccgaagatgtgtccggccccttctaactctctccttcatccgggctagcagatgaccccagtggtccccaatttctggcagacatgtctccatcttctacctggcatattttacctgcctcagtgtaccccaggccgcttactagctttctgcatatctagacttcccctaatgcctccttcccgcttacgggagagcctcagactctggactcagctcccatgagctcctggacccctactcatttcttgcaatttaatgggtcatgcagctccacccactcaccccttttgatctctcccctcctccgtcctgtgaaaattccagtcccgcatccttctgagcccgggacccccagtcaattcctgggtcaggtgtctccttaaccctcccgatttacagtgcttaaccctcatttctgctttttggggtctcccaatggattgtcagtcctcctacccctctcgtattctgggtacctcaggggtttcttcgcacatactgggaccctcaccccacttgctgcgtaccaggtcctggtatttgtcccagtggactccagggaaatcatcctcctccctgaaacccctcactcatgtgcctgggccccccagcacctccttccatgcgtaccccgaggtcctttgagcccctccccctgcagccccgccgagccacccggcccgtggccgctgtttacaaggacacgcgcttcctgacagtgacgcgagccgcctcctccccttccccacgctcgaggaggggggcgcgggggcccggctccggcgacggccaatcggagcgcacttccgtggctgactagcgcggtataaaggcgtgtggctcaggctgagcggctgggaccttgagagcggccaggccagcctcggagccagcagggagctgggagctgggggaaacgacgccaggaaagctatcgcgccagagagggcgacgggggctcgggaagcctgacagggcttttgcgcacagctgccggctggctgctacccgcccgcgccagcccccgagaacgcgcgaccaggcacccagtccggtcaccgcagcggagagctcgccgctcgctgcagcgaggcccggagcggccccgcagggaccctccccagaccgcctgggccgcccggatgtgcactaaaatggaacagcccttctaccacgacgactcatacacagctacgggatacggccgggcccctggtggcctctctctacacgactacaaactcctgaaaccgagcctggcggtcaacctggccgacccctaccggagtctcaaagcgcctggggctcgcggacccggcccagagggcggcggtggcggcagctacttttctggtcagggctcggacaccggcgcgtctctcaagctcgcctcttcggagctggaacgcctgattgtccccaacagcaacggcgtgatcacgacgacgcctacacccccgggacagtacttttacccccgcgggggtggcagcggtggaggtgcagggggcgcagggggcggcgtcaccgaggagcaggagggcttcgccgacggctttgtcaaagccctggacgatctgcacaagatgaaccacgtgacaccccccaacgtgtccctgggcgctaccggggggcccccggctgggcccgggggcgtctacgccggcccggagccacctcccgtttacaccaacctcagcagctactccccagcctctgcgtcctcgggaggcgccggggctgccgtcgggaccgggagctcgtacccgacgaccaccatcagctacctcccacacgcgccgcccttcgccggtggccacccggcgcagctgggcttgggccgcggcgcctccaccttcaaggaggaaccgcagaccgtgccggaggcgcgcagccgggacgccacgccgccggtgtcccccatcaacatggaagaccaagagcgcatcaaagtggagcgcaagcggctgcggaaccggctggcggccaccaagtgccggaagcggaagctggagcgcatcgcgcgcctggaggacaaggtgaagacgctcaaggccgagaacgcggggctgtcgagtaccgccggcctcctccgggagcaggtggcccagctcaaacagaaggtcatgacccacgtcagcaacggctgtcagctgctgcttggggtcaagggacacgccttctgaacgtcccctgcccctttacggacaccccctcgcttggacggctgggcacacgcctcccactggggtccagggagcaggcggtgggcacccaccctgggacctaggggcgccgcaaaccacactggactccggccctcctaccctgcgcccagtccttccacctcgacgtttacaagcccccccttccacttttttttgtatgttttttttctgctggaaacagactcgattcatattgaatataatatatttgtgtatttaacagggaggggaagagggggcgatcgcggcggagctggccccgccgcctggtactcaagcccgcggggacattgggaaggggacccccgccccctgccctcccctctctgcaccgtactgtggaaaagaaacacgcacttagtctctaaagagtttattttaagacgtgtttgtgtttgtgtgtgtttgttctttttattgaatctatttaagtaaaaaaaaaattggttctttattaatttctgttgtctttttttccaagctgggagggcggggggaaaaaaaaaagcactggtttgcccccagctcagtgctgttggtggctcggtcctgtatgtgtccccctcgtcggttcggcgcaggcatcttgtggtcccagcccaggagtcccacccttcccgcgtccccagatctccagggttggatggttggggcgcgggacgcggtccagggacccaggagctgaaggcagggtgctccggccgagacttggagtgcgcaggcgcgtccccgcccagccgcgcgcgccggggctttccccgctgacgcagcggaagcgctgcccatacaaggaccgattctgcccagtgacgcgaccgcggtctctgggcagattccgggaatcccctcccccgctctgccgggcagggccgcggcgccgggaagggggccgggattttcccgggcaggcggctgcccgggcacggaaagccccaggcctgggtccagagcgcccgcggtgggcgggcagcgctcctgggctccgggagccacccctgtgccaccttcaagacactggcgcctaggccccgccgcgcccacgccccctccgtctgacctgaccggggcggagggttgctgctgcctccgctgctttgccgacgccgtcccctctacccccaccccctccaggaagggcggcgcccgcctgccagtttcccctcacgggtgccaggccaggagcggggcgactgccaggtctggtcctgccggggcggctgctcgggccgctgggcgccgccaccgccctcgcgctgggctccctcccgcgcagctgggacacgtggaggtgggggtgggggtgctggtgctgctggcccgcctagagggagtctggccggcttcggggttggaagcccccagagcagtggagaaaaacaggtagagaaaccagacaggcagtagggtgagtggaacagacacttcatcaattcatttgtacaatacctagaacaactagaccctggagacacagcctggaccactccagacaagacaataaataaacaagcaaacatggttctttgggggtggtggtaagtgctagtaagaggaaaaaaacaaactaaaacaaacaaaaaaaaaaaacaaaaaaaaaaggtcaaggtggcaatgatggggcagggaggaaagatgctttgcagaatggagtgggaacatggacctttaatagggtgactttttcttttttatattttagagacgggtctttgtcctgttgctcaggttggagcgcagtggtgcaatcatagctaactgcagcctagaccttctgtgctcaagcaagccttccacttcaacttcccaactagctagagctacaggcatacaccactatgcctggctaattttgtttatttttgtagagatggggtctgctatgttgccctggctggtctggaactgctgggtcaaacagtcctcccgccttggcctttcaaagcactgggattccaggcgtgagccagtgctcttctcctgcagtgactttttttttttttttttagacagattcttgctctgtcacccagacttgagtgcagtggtgcgatcttggttcactgcaacctctgcctttcgggttcaagcgattttcctgcctcagcctcccaagtagctaggattataggtgcctgccaccacgccctgctaattttgtatctttagtagagactgggtatcagcacgttggccaggctggtcttgaactcctgacttgaggtcatctgccagcctcggcctccaaaatgctgggattacaggcgtgagccatcgtgcctggccatgacttttcaacagatttgaagaagtggggtcctgagaaaatcctgggtaacaacagcatcagaggtaacagttttttgtttgtttgtttgtgttttttagatggagtctccctctgtcacccaggcaggctggagtgcagtggctcgatctcagtttaccgcaacctccacccacaggattcaagcgattctcctgcttggcctcccaagtagctgggtctacaggcgtgcatcaccatgccaggctaatttttgtatttttagtagaaacagggtttcaccatgttggccaggctggtctcgaacccctgacctcaggtgatccgcctgcctgggcctcccaaagtgctgggattacaggcctgagccaccccgctcaactgggagcagctttttttttttttttttttgagacggagtctcgctctgttgcccaggctagagtgcagtggcacgatctcggctcactgcaagctctgcctcccgggttcacgccattctcctgcctcagcctcccaagtagctgggactacaggcacctgccaacatgcctggctaattttttgtatttttagtagagagggggtttcactgtattagccaggatggtctcgatgtcctgacctcgtgatccgcccgtctcggcctcccaaagtgctgggattacaggcgtgagccactgcgcccggccttgggagcagctcttaaatggcaaaattcatgtagccaggtgagcctgtgaaagaacagcaggaagccagcctgtctggaatggagtgaaccacaacagggcagatgtcaagggagactgagcaggggccttggggaggagtgtagattaaattccaagggagatgagtgacccttagagggtattaggtgggtaccagcattaatagtggatctgtggattaaatgagcatattagccctgttctgtaggaggaaattggggcatagagtagcaaaactactttcctgaacgcacacaatattaaactgcacccctgggaaccctgccttgctgctaatacctgccttctagcctaactgccaccctcccaccccaggggcagacaggcaacctttccagcctggggtggggcagagctcacagcagggactctgcactctgcacgtagctcaggctctcattcttggttctgctcttaagactgggtccccaccctcttccccataagactacactgggctgggttcctttcagctcgaggaagccgtcttaggaactaggaactgggccctacacaggggcctcagccccgagcttcacataacttatctcctacaaattttaccacgtgcatggtgatctgggtttgcagtcccattttactgctgaagagacccagagacgatcacagctcttaaacggcatttgaacccaggctggctggtgacaaaatgtgggctttgccttgcatggccagatttctggatgtagggcatcctgggatttgcaagggacaaacggcataccctacccctccgaaaccgccttgagcgcaagcaggaaaagagcaggcactaagcatgtgataagaccgccaccgtgtggcgaagatgagcaaccacagggtcagtttcccaagcctgagcctgaagaaggaagggggttgcaggggaggacgaaaggacagagcacaccaacacagactcacacctttccctaatactttattggttacctctaggcctgtgtgcggctgggtgggcttgggggagggcgtcactattcagcttctaggtggaggcatgagaaggccttggcctagccctccagggtcccatactgtggagtttggaggggcaggtctggcctttcctgggtcagcatagggcacccaggtgggggcacaggtggacacccagcacaggcacctaggcaggggcacaagctcactatccgttagccagcctaattgtgtttggagaaatattccttgctgtcatccacgttgggcttaatcgtgtcactgccaggcttccagccagcgggacaaactgtgggaagacacaaggatgcacatgaaggctacagccccaggttcaaggtgaagcaaagcaagggcctgtgttgcagaagaaaatgctggaagcaagtggtccaggcccaggaatgtggatattaagataaaccctccaagcccagttcagtattttttcttttttttttttttcagacagagtcttgctctgttgcccaggctgaagtacagtagcatgatctgagctcatgcaacctctccctcctgggttcaagcgattctcatgccccagactccctagctggaattacagaggtgcaccaccacgcctggctaatttttgtatttttggtagagaccatgttagtcacgcttgtctcgaactcctgacctcaagtcatctgcccgtcttggcctcccaaagtgctgggattacaggtgtgagccaccatgcctagccaagttcagtattttctctttttcttttcttcttttttctttctttctttttttttttttttttttgagacagagtcctcctctgttgcccaggctggagtgcaatggcgtgatctcggctcattgcaacctctgcctcccgcgttcaagtgattctcctgccttagcctcctgagtagctgggactacaagtgcccgccaccacaccctgctaattttttggtacttttagcagagacagggtttcaccatattggtcaggctgatctcgaactcctgacttcaggtgatccacccaccttggcctcccaaaatgctaggattacaggcgtgagccactacacctggccaagttcagtattttctagctggtgtttttcctactcttaattcttcaatttctttttgccacccagctctcctttttcttctttttttcttttctttttttttaagatggagtcttgctctgttgcccaggctggagtgcagtggcacgatctctgctcactgcaagctccgcctcccaggttcacgccattctcctacctcagccgccagagtagctgggactacaggcgcccgccaccacgcccgactaatttttttgtatttttagtagagacagggtttcaccgcgttagctaggatggtctcgatctcctgacctcttgatccgcccgcctcagcctcccaaagtggtgggattacaggcatgagccaccgtgcccggcctcttttttttttttattttttgagacggagtttcgcttcactcgttgcccaggctggagtgcaatggcacgatctcagctcactgcaacctccgcctctcagcttcaaacgattctcttgcctcagcctcccaagtagctgggattacaggcatgcaccaccaggctgggctaattttgtatttttagtagagactgggtttctccatgtcggtcaagcttgtctcgaactcccgacctcaggtgatccacccacctaggcctcccaaaatgctgggattacaggtgtgagccactgcatctggcctctttttttttttttttttttttaaccaataccccatctcttaaaaaaaaaaaaaaagagatggggtattgctatgttgcctaggctcgactcaaattcctgggcctaagcaatcttctgcctcactctccagagtaggtggaactacaggcatgagacacagcatctacaggcatgagacacagcatcttcctgtctttttggctcctttagtcccatctttgtccctctgccccacccctacaggtttttttgttgttgttgtttttgagatggagtctcacactggcgcccaggctggagtgcagtggtgtgatctcggcttactgcaacctcctcccgggttcaagggagtctcctgcctcagcctcccaagtagctgggattacaggcacctgccaccgcacccagctaatttttttgtatttttagcagagacgcggtttcactatgttggccaggctggtctcaaactcctgacctcatgatctgcccgcctcggcctcccaaagtgctgggattacaggcgtgagccaccgcgctcggcctgtttgtttgtttttttgagacagggtcttgctgtgtcacccaggctggagtgcagtggtgcgatcacagcttactgcagccttgacctcccaggctcaagtgatcctccagcctcagcctcttgagtagctgggactataggcatgcttcacaaaccaagctaattttttttttttttgagactgagttttgctctgttgcccaagctggagtacaacggtgcgatctcagctcactgcaacctctgcctcctgggttcaagcgaactcctgcctcagtctctcaagtagctgggattacaagtgtgcaccaccacggccagctaattttttgtgttcttcgtagagacggggtttcaccatgttggtcaggctggtctcgaactcctgacctcaggtgatccacctgccacagcttcccaaagtgctggcaatacaaccgtgagccactgagcccggcccctttgtccaccttggttgaatgtcaggcgttatttgtctcctaccacattagaaacatcctgcagacaaagccctgagctgaatcttctttggggccctaacacccatctggacaggtaagaggacaggcagtgaatgtttgcatgagtgacggaggcgctcagtatgtacccatgtgtcatgtgtgtatctgctcaccttccccatgctcgtctgtgtactggaaggcctggaccagccgcagagcctcatccacggagcgtcccacaggcaaatcattaacagtgatctggcgaaggacacccttgccatcgatgataaagaggcccctgaagacatcagggttcccagtgaggagctgatagctcccactgccagagacaaggaagggactaccaaccacccgctgctagccacagggctgggggcagagaagacattgtacaggagtggtcccagcatcacaggaatggggggcagggcgctccctgagccgggctgagggtcccacagtacctgtaggcaatgccctcatctgttttcagcacgccgtaatcctcagacaagcgtctggtcacgtcagcaagcagggggatgttcagggggcccaagcctccctctttccggggggtgttgatcctgggagtaggggagacagagttggggcctcaggatgcctggcacagcagggtcctcaccctgtgggcccaatgtgataagcactggaggccggagataaggggctttagagtaggccgctgggagcctcacccaccccaccctgggttgggtgcaaggactgtatccccatggctgggaagactgagtttgagaggcacagctccagctaagtggcttcacatgtacttgtaacttgcagcatcacccagcagagagcctgtgttaagagtccccatcctcctctagctgtgtcatggggtacagcccttcacttcggtgaactggagtttccatcttcatgaaatagggcagcacagcctccctcctgggaactaagtacatagagtagatagagttgcatctgagttgcatctgcaactctatataccaggcaactagttgtcaaatgctaattactgtcatcatccttaaagacttgggcggcaatgtttccattattttcacgatggggaaacgcaggttccagaggttgagcaatggccacgaagccacactgctaggacctgagggtgtgagcttagctgcaacctccctctttggcccctgctcataccaagccaggtgggtgaactgagagtccaccgagacgcccagcacttcacagcccagcttgcggaagtcctctgcacggttgctgaacgcgatgatctcggtggggcacacaaaagtgaagtccagagggtagaaaaagaggaccacgtacttccctggggaggagggacacagaggagttagggcccagcttctctcatgcacggccccgcttctacctgggccccctccgggcggcgctcacctttgtagtccgacagcttcacctctttgaaggcgccatcaaccaccgctgtggccttgaagtcaggggctggctttccgatgcgcgcgttaccggaggccatgactgaaagctgagacccccgcccggtcagtgcgcccgggaagacactttgtcctcccaacccaaggtcgcgctgcgtgctgggccctatgactgagtcagcacggcggaggcgacagcactaaccctcaccctcccgggtacccggtctacgaggcccggaggctgccggagacccgctctcctgaccagagcacgagtgacccagccactgccaccagcaccccacgagcgagtcggccggagggcggtgtcgcaagcccccagcccagaaggagacagtgaggcccgcacgagcagggggcgggaagtcgggcgatcaggcctgcgctgcaaggctgtggcctcggtttcccccgcaaggacaaaggaggccactatagcggatggaaagcaaaggcggccagcactaaagtcaggatcgggccaaagcagcctgaagggggtcctcccgccaggtgcactccgggtgttcatacctgcgtgggcaaaggctagacgcacggacgatcacacgcgtggacccgcgttctcagcgccaagtgagccctgggccgcgaagccttttatgcccggcccgaaccaagacgtgcacggcgcgggggagggagcggacgagcggagcggtcgggtccactgcgcccgcaggtgcgggggagcgtgcggccgggtccatgcgcctgcgggcggcggggggagacgcgttgccttcggccgggaccactgcacctgcccgcgtgggtaatgcgcccgccgcagactccgcgcacgactccgcctgggagcgcgttgggggccgttggagtccagcatggcgcggaccccgggggcgctgctgctggcgcctctgctactcctgcagctggcgacccctgccctggtctaccaggactatcagtacttagggcagcagggcgaaggtgacagctgggagcagctgaggctgcagcatctaaagggtaacctcaggcggcggggatgacgatgcccaaaggctccccgttgccctacttctcctgctggctgcaaagggaccttcctcggcgggctgcaaatctccacccagctccgcactggaggcgtccccttgggctggttacttttctctaaggctcggtttactcttggatatattgaaatagatactgctttaaagcagctcccaggggaagagagggtgtgggcaggacactgaagctgtcactcggggataggtgccaggaagggcagagacagagaaagaagggggcgggcaagcttgggaaatcagagagggtccgattgcagaagacccgtgaccagtgcagcgagaacgacaagcgaaagtcccatatggaaagatttggggaaagaatgtccaaggaagagggaatagcaaatgccaaggtgaaaagtcctgaaggagaaatggaaagaggtcggtgaggtgtggcagagacatgggtgtgggagggtaggaggtgtcagaccttggtgagcggtgagttgggataagatcggagttgggataagatctgtctcataggggaaaggggcagattcagtaaagagccctttaaagtgatcacagtggccggcgcggtagctcacgcctataatcctagcactttgggaggctgaggtgggaggatcccttggtctcggagaccagaccagcctggcccacacagcaagactccatctctacaaaaaatattttaaaattagcctgacttgatggcccagcactttgggaggccgaggcgggaggactgcttgagcccaggaattcaagaccagcctgggcaacatggagagaccccctactctacaaaaataaataaataaataaaaataaaaaataaattagcctgccatggtggcatgcgcctgtagtcccagctactcaagaggctgatacaggaggaccatttgtgccaaggagtttgaagctgcagtgagccatgattatgcccttgcattccaacctgggtaacagagcaagatcttgtctcaaaataaataaattaaataaataaacaaactgatcataataaattggtttgtatatgctagcacagcaccgggagatttacttaccttcattatgtcaattatgccatttatcacttgacaaccctgctgtcaggtggcattgtgccttctaggtagggccatggtcacacccctgaagacagaagtcagcttcaaatggcgggcaccaaggatgttgtaggacactcacaactgggcaggctggcacagcctggaagtgtcaggttgtagttcctctggcccacttaccccgtatatgagcttggaaggttggcttgctgtctctgggtcttggtttccccacctgagactcgtggaaatattaaatgaggccaggcatggtggctggctcacacctgtaatcccagcactttgggaggctgagatgggagtatcacttgagcccaggagttccagaccagcctgggcaacatggtgaaacaccgtctctgcaaaaaatacaaaaaattagccaggcacagtggcatgtgcctgtagtcccagctacttggtaggccgaggtaggaggattgcttgagcccaggaggttgaggctgcagtgagctgtgactgcgccactgcactccagcctgggcgacagagcgagaccctgtctcaaaaaaaaaaaaaaaaaaaaaaaaaaagcttaaatgagataatctgtggcagggtgtctggcatagaagcagagtctagcgaatatgtgcttctcttattcgttagtatctttatctttctccctctctgggggaggggattgggagtaggccccctccacgtaggtcttcacctctgccctccttctctagaagtcgaggactcaatccttggcccgtggggaaagtggcggtgtctctgcgacctgggcaagcaggagcgcagccgcgaggtagtgggcacagcgccgggcccggttttcatggacccggagaagctgatccagttacggccctgccggcaacgggattgtccatcctgcaagcccttcgactgcgactggaggctctgagcccgggtgagagagcagggccggggcaagttgcggggcccagggtgggcgcggagggaggatgtgcggtgcggggcgggtatgaagcgagtttgaggaagggagaactggggctccaagtcttgagtgacttgaggctgatttggttagggggaagctgagtcaggagccgtgagccccgctgatatctagggagaaaaggagaaaagtggagggggcgccgggcgccggggctcacgcctgtaattccagcattttgggaggccgaggcaggcggatctcttgagtcctggagttcaagattagtctgggcaatatcgttgagatcacctctccataaaaatttttaaaattaggccgggcgcggtggctcacgcccgcaatcccagcactttgggaggccaaggcaggcggatcacaaggtcaggagatcgagaccatcctggctaaaacggtgaaaccccgtctctactaaaaatataaaaaattagctgggcgcggtggcgggcgcctgtagtcccagctactcgggaggctgaggcaggagaatggcatgaacccgggaggcggagcctgcagtgagccgagatcgcgccactgcactccagcctgggcgacagagcgagactctgtctcaaaaaaaaccaaccaaacaaacaaacaaacaaaaacatttaagttagatgagcgtggcggcacatgcctgtggtcccagctactcggtacgatggggaggaaggatcgcttgagcctgggaggcaaaggttacaataagccgagatcgctacactgctatccagcctgggcaacagagtaacatcctgtctcaaaaaaaaaaaaaaaaaaaaaaaaaaaaaaaaagtggagggggaggcgaagaggagtaaaaggagataaagagacaatgaactaggaccctgaggaaggggcatgagcctggtaaggggcgggaacccacaggcagaggacatgagccccagtgagcccagggaatagaagtggtggatgccaggcactgtggctggctcaggcttgtaatcccaacactttgggaggctgaggcgaccggatcgcttgagcccaggagtttgaagccagcctgggcaacataatgagaccccgtctctacaaaaaataccaaaaatagtcgggcatggtggtgtggtgtgcacctgtagtccagctgcttgggagactgaggtgggaggatcgcgtcagcccaggaggtggaggttgcagtgagccaagatcgcgccactgcactccagcctggacaacagagagagaccctgtctaaaaaaaaaagaaggccgggtgcggtggctcacgcctgcaatcccaacactttgggaggccgaggcgggcggatcacaaggtcaggaaatcgagaccaacctggctaacacggtgaaaccccatctctactaaaaagtacaaaaaattagccgggtgtggtggcgggcgcctgtagtcccagctattcgggagactgaggcaggagaatggcgtgaacccgggacgcggagcttgcagtgagcggagatggcgccattgcactccagcctgggcgacaagagcgagactctgtctcaaaaaaaaaaaaaagaaaaaaaaaaagtgggtcgaggggtgggggtggggacattcattctaagttgggaggaatgagcttctatagggagcagagaccctgagcaggagtccaccgaggtctgtgatctccaacgggggtggggaaggcttggcctgaatgagacagaggttaggaagcacagatcttgcacggagtggaggtgggccgaagggagcaaccaagagagggagtttggggactccaaatccaaaagcctgggtttagtggaagcggggctacctggtccaggggacttagaatgtgtacagaagcagggaccgcaagtacagggcctgaatccaagtggcagttggggacccagtgatgcggtgacccgtgtcctgggagtggggtgatatttgactctctagttccccgttaggctgggtcttcgaagctacgtctcagtttccctcttatttccccctcttcccaccgggccacgcaggcggggccccagagaccgtgaagcagagcttgcaaagtgaccccgtccaccgaattccccaagctgagtgttcggccatagcccttcgggactacaattcccaggagggcgcacggcagcgacgtcggcgtcggctgcgtaagcgtccacggcggcgggagcgccaggggcgtgttctgcccgcggattggccggaagcaggcgccgcttcgaggcccgcggaaaacgcgcgccgagacccgctcctgcagtattagttcttgcagctggtggtggcggctgaggcggcatggatctcagcgagctggagagagacaatacaggccgctgtcgcctgagttcgcctgtgcccgcggtgtgccgcaaggagccttgcgtcctgggcgtcgatgaggcgggcaggggccccgtgctgggtgcgcccctagggccagggaggggaggggcgtggtacggaggatgcgggaaacgggagtcgggattgcactgcaccaagggaggggatgtggtcgtggtgatggcacctaaagaagcagtgatgatagaacagggatgaatggcaactttcacgggctcagtgattggaccccggctgccagaaaactgacaccccttctccccaggccccatggtctacgccatctgttattgtcccctgcctcgcctggcagatctggaggcgctgaaagtggcaggtgagcccgaggtgtgcgtctggggaagggattcctgggtatgtgcaggggcaggtgagaactgaaaggggagggcaggaactgggagaaccagctgttccccttctcttccaaacctcctcccagactcaaagaccctattggagagcgagcgggaaaggctgtttgcgaaaatggaggacacggactttgtcggctgggcgctggatgtgctgtctccaaacctcatctctaccagcatgcttgggcggtgaggggtccccgggaggggcagccagcatgggctgaccaagctttgttcctagaatgagattaactgggctctgttccccaccacagggtcaaatacaacctgaactccctgtcacatgatacagccactgggcttatacagtatgcattggaccagggcgtgaacgtcacccaggtgagttaactgtaagttgtccccatttggtcatctcaggataaaatggggacaaaacaggagttcgagactgcagtgagccatgatcatgccacagcactccatcctgggtgacaaaggaagccccccaactcaaaaatggaggcagggcgcagtggctcacgcctataatcgcagcactttgggaagccgcggcgggtagatcaccggaggtcaagagttcgagaccagcctgaccaacatggtgaaaccccgtctctactaaaaatacaaaaattagctggacgtggtggcaggcgcctgtaatcctagctactcaggaggctgagacaggagaatcgcttgaacccaggaggcagaagttgcagtgagccaagattgtgccattgcactccaacccgggcaacagagcaagaccctgtctcaaaaaaataaaaaataaaaaataaactaaaaatgggagaccaggcgcagtggctcacggctgtaatcccagcgtttcaggaggctgaggcaggcagatcacctgaggtcaggagttgaagaccatcctggccaacatggtgaaacctcatctctactgaaaatacaaaaaattagcccagcatggtggcgggtgcctgtaatcccacctattggtgaggccgaggcagaagaattgctcgaacccgggaggcggaggttgcagtgaggtgagatcgcgccattgcactccagcctgggggacagagcgaaaaataaaaataaaaataaaataaaaaataaatgtgggcaaaaatgtgcagtgtgcagattcagcatcagatacgtctggagtgcctcgggcatattcattgctactgttgatttcgtgctcctgtttctgccctaaatgtgtgccacactgacgaccacagtgtagcccctagtcccgtctccatctaatctctccctcatcctaaaggctcagtctccagaacaaatcctacattgtctacctgtcacctctgtcctagcccaggacaccccccactccctggacacctgctgagtgtcgtctctcgtccctcaccctcctatcccctccaatctgttccccaagcagcaacagaaggtagtctttttgaaatgcacatctcgacatttagttttccgatcacagtggaaattaaatcaggaaaattcacagtcgagtggggcagaattacattaaattaccagagaaaaacataaatcagcattgcctcgaatgctctcaatgaaagaatggaccgttctgagagaataacaaggcaaaataaccttgacgtaggaattgtatgctgggtatggtggctcacgcctgtaatcccagcactttgggaagctgaggtgagcaaattggttgaggctaggagttccagaccagcctgggcaacatagcgagactccatctccacaaaaagaagaagaaagaaaggaattatagcaaggtagaccctgctgaggagggacctgaggaccaggcccaaatgcagagctggcgatacagtaactggtgtagacagacaagggccctacccgtaggcgttcagggcctagcctgggcagaaagatggtcagctggaggttgggcgcagtagctcacgcctgtaatcccagcactttgggaggccgaggcgggcggatcatcaggtcaggagttcgagaccagcctgaccaacatggtgaaaccccatctctactaaaaataaaaaataaaaaaataaaacatgaaagatggtcagctggtaaacaaaaaataaaggttgtttctgaaaacagtagtgctgtggagataccactttcccccagcagctcttggaccctctcttcggtgctgcagccaaaggcccccatgcatgggcccagcatcatgaacctggtcccagctcagggcctttgtactggctgttctcacacctagagccctcttccccagatctctgcacagttcacttcctcacctccttcaagcctttattcaccactacacctagctaactttttattttttgtagaaacagggtctccatatgttgcccaggttggtctcaaccacctgccctcaagcgatcctcccacttcggcttcctaaagtgttgggattacaggcttgtgctaacgcactctaccaatttttttctagtgttttctgccacctcagttcctagaacagtatgtggcatgcagtaggtgctaaataagttagagtaaaagcagcgtgatagagaaagcctcttcaggaggtgagttttttctttattttattgtatttattttatgtttttataaagatggggtctcactgtgttgccaagcctggcctcaaactcccaggatcaagcgatcctcccgcctcagcctcccaaagtgctgggatcacaggcctgaacaactttgcctggtctaggaggagatgttcgagttgaaatccctgattgatccatcctggggacgtgctggagaagaggattctgggtagcaggaagaacgtgccagggctgtgaggctagagcattggtacagttgtttgttcaattaatatgtgtctgttgctgtggcaggtattcgtggacaccgtagggatgccagagacataccaggcgcggctgcagcaaagttttcccgggattgaggtgacggtcaaggccaaagcagatgccctctacccggtggttagtgctgccagcatctgtgccaaggtcagtaccctactagccatggctggcttccaccatcccactatataggggccaggcatggccaccaaagggaaggagggagattccaggtgcctgttttgcccacaggtggcccgggaccaggccgtgaagaaatggcagttcgtggagaaactgcaggacttggatactgattatggctcaggctaccccaatggtgagcagacacgtgaccatggtactaatgttgaaatggccagggctgagcacacttctgaggttttctttttttcctttctgtcatttatcattttattttgcttattttttgtttttatttgttatttttgtttattttttgagacggagtttcgctctttttgcccaggctggagtgtaatggtgcgatctcggctcaccgcaacctccacctcctggcttcaagcgattctcctgcctcagcctcgcgagtagctgggattacaggcatgtgccaccacacccagctaattttgtgtttttagtagagactagttttctccatgttggtcaggctggtcttgaactcctgacctcaggtgatctgcctggctcagcctcccaaagtgctgggattacaggcatgagccaccgtgcccagcctattttttgtttttatagagatggggtcttgtcatgttgcccaggctggtctcaaattcctggagtcaagcagtcctcccaccttggtctttcaaagtgctgggattacagccatgagccaccacccctggccctttttttcttctttttttaaagagatggggtctccctatgttgcccagcctggtcttgaattcctgggcttaagtgatcctcctgccttggactcccaaatagctaggattacaggtgtgaactactgtgcctggctggaggttttctaaattgctctggtcaccctactccacagtgaaagaggccaagtgttagacagtggtgccatttgtttatggccacacagccagtgagtgatagagctgaattccaggccataggattgctgctgtcttccccgcttcccactttgctgtctttctggagccccagtgatggactgagacccaaggtgggcatttgtccctttgttaaggggaaggggaccaggcgtggtggctcatgcctgtaatcccagcactttgggaagctgaggtaggagaaccgcttgagtcctcgagttcaagaccagcctgggcaacatagcgagacccccatctctataaaaaatttaaaaaattagccggttatagtggtgcccacctgtagtcccagctactctggaggaggaggctaaggtgggtgggttgcttgagcccaggagttggaggctgcagtgagctatgattatgccactgcactccagccttggtgacaagatgagatcttgtgtcaaaaaaaaaaataatgttagccaggcgtggtggctcacacctgtaatcccaggactttgggaggctgaggcaggtggatcctttgaggtcaggagttctagaccagcctgaccaacgtggtgaaaccccatctctactaaaaatacaaaattagctggacgtggtggcacacgcccgtaatcccagcaactcgggaggctgaggcaggagaattacttaaacctgggaggtggaggttgcagtgagccgagatcgcataattgcactccagcctgggaaatgagcaaaattccatctcaaaataataataataataataataataatatttaatgacaggctgggccaggtggctcatgcccgtaatcctagcattttaagagacagaggcaggtagatcatgtgaactcaggaattcacaaccagcctgggcaatatgacaagaccccatctctacaaaaaatacaaaaattaggtgtggtggtgcgcacctgtagtcccagctacttgggaggctgaggtgagaggatggcttgagcctgggaggcagaggttgcattgagctgtgataatgtcactgcactccagcctgggtaatagagcgagaccctatctcaaaaaaataaaaaggctgggtgtggtgtttacacctgtaatcccagcactttgggaggctgaggtgggtggatcacctgaggtcaggagtttgagaccagcctgcctgtccaatatggtgaaaccccgtctctactaaaaatacaaaaattagccaggtatggtggtgggtggctgtagtcccagctacttgggaggctgaggcaggagaatcgcttgaacctgggaggcggaggttgcagtgagccgagatcgcaccattgcactacagcctgggtgacagagcaagactccatttcaaaaaataagtaaataaaataaaaatgtttaatgacttgttcttggaggtcaaggagatgtctcagaggcagtctccctgcactgcccttttagcagctcttggccaggtaaaggtcctgtggcaagaaggtgcttcagaccataggaggtgccccaggtactcaggaggaagccttagaagagcggcaaggaggccgggcgtggtggctcatgcctgtaatcccagcactttgggaggccgaggggggtagatcacgaggtcaagcaattgagaccatcctggccaacatggtgaaacctcgtcactactaaaaacacaaaatttagctgggcatggtggcatgcgcctgtagtcccagctacttgggaggctgaggcaggagaatcgcttgaatccgggaggtggaggttgcagtgagctgagatcgcgccactgcactccagcctggctacagagtgggactccatctcaaagaaaaaaaaaagagtggcagggagcttgaatgttatggtgcaacttggactgtcaccattgcccaccctaccccagatcccaagacaaaagcgtggttgaaggagcacgtggagcctgtgttcggcttcccccagtttgtccggttcagctggcgcacggcccagaccatcctggagaaagaggcggaagatgttatatggtgggtgtcatggatgtcctgggggtgctatagggaaggaaggagggaggccagcgttcagccctgcctgagagggttgctccctgtgtaagtggtcactgtcatcacctctctcccacagggaggactcagcatccgagaatcaggagggactcaggaagatcacatcctacttcctcaatgaagggtcccaagcccgtccccgttcttcccaccgatatttcctggaacgcggcctggagtcagcaaccagcctctagcagctgcctctacgcgctctacctgcttccccaacccagacattaaaattgtttaaggagaaccacacgtaggggatgtacttttgggacagaagcaaggtgggagtgtgctctgcagccgggtccagctacttccttttggaaccttaaatagaatgggtgttggttgattaattttatttggtttgatttttttcatttttaaattttatttattttattttattttattttatttttttgagagacgaagtctcactctgtcacccaggctggagtagaatggggcaatctcagctcactgcaacctctgccttccaggttcaagcgattctcctgcctcaatttcccaagcagctgggactataggcgtgtgccatgcccaactaatttttttttttttttgagacacagtctcctgttgcccaggctggagtaccatggcacaatcttggctcactgcaacctccacctccctggttcaagcaattcccctgcctcagcctcctgagtagctgggattacaggtgcacaccaccacacccggctaattttcttttcttttctttctttcttttttttttaatttgagacagagtctcactttgtcaccaggctggagtgcagtgatgcaattttggctcactgcaacctctgcctcctgggttcaagcgattctcctgcctcagcctcccacgtagctgtgactacaggcatgcgccaccacactcagctaatttttgtatttttagtagagacggggtttcaccacgttggccagactggtcttaaactgctgacctcaggcaatctgcccgccttggcctctcaaagtgctgggattacaggtgtgagccactgcgcctggcctaatttttgtattttttagtagagacaaggtttcactatatgttagtcaggctgctctctacctcctgacctcaggtgatctgcccacctcagcctctcaaagtgctgggattacaggcatgagccactgcaccgacctttttagttatatttttaatttttaaaaatttttaaattttctttcttgagatggagtctcgctctgtcacccaggctggagtgcattggctcaatcttagctcactgtaacctctgcctcccaggttcaaatgattctcctgcctcagcctcccgagtagctgggactacaggtgcgtgccaccaggcctggctaattttttgtatttttagtagaaacacggtttcaccgtgttagccatgatggtctcaatcttctgaccttgtgatccgtctgcttcagcctcccaaagtgctgggattacaggcgtgagccgccatgcattgcctatttttatttaaaaaattttttgagacagaatctcactctgtcacccaggctggagtgcagtggtgcgatctcagctcagtgtaacctccgcctcctgggtttaagtgattctcccaccttaacctcctgagtagctgaggttccaggcacacgccacgatgcccaactaatttttgtattttttgtagagatgaggtttcatcatgtcgcccaggctggtcttgtagtcctgggttcaagtgatctgcccgctgtgacctctcaatgtgtgagctaccatacctggctgactaatatgtaaaatacatgatgtggctgggcgcaggggctcatacatgtaatcctagtgctttggaaggctgagtcaggaggatcttgaccagtctggacaacatagggtaacaagagcgaaactctgtctcaaaaaaaaaaaaaaaaaaaaaaaaatgctgggctgcatgggggaagataagaaaaaataaagaaaggtcacgaaccaaacaaaaatcttggcgggcagggtgccgtgtggctgcagtcccagcttttctggaggttgaggtaggctccagcatgggcgacagagcaagaccatgtctcaaaaaaaaaagcatatctgcgcattaatgtttggaacaagctgcattctctccagaaggacctagaaggcacagataagcccaccagtgatttggggcaggttgggatggaagcttctcaaatgttctcccttctttctttggttctgtttttgttggttttattttgttttgttttgagacagagtctcgttctgtcacccaggctggagtgcagtggcacagtcttaagtcactgcaacccccacttcccaggttcaagcaattctcccacctcagcctcccgaacagctgggactacaccatgcccagctagtttttgtatttttaatagtgacagggtttcaccatgttggccaggctggtcttgaacccctgacctcaagtgacccgcctgcctcggtctcccaatgtgctgggattataagtgtaagccactgtgcccagtctgtttttgttttctgagacagggtctccgtcacccagaccgaagtgttgccatgtgatcttggctcattgaagcttcgaatgcctgggctcacagggtcctcccacctcagccctgtgagtaagtggaactacaagtatgccaccacgcacagccaatttaaaaaaaatggctgggcgcggtggctcacgcctgtaatcccagcactttgggaggccgaggtgggtggatcacgaggtcaggagatcgagaccatcctggctaacacggtgaaaccccgtctctactaaaaatacaaaaaaattatctgggcgtggtggtgggcgcctgtagtcccagctactttggatgctgaggcagaagaatggcatgaacccgggaggcagagcttgtagtgagccaagatagcgccactgcactgcagcctgagtgacagtgcgagactgagcctcaaaaaaataaataaataaataaaattaaaaaaaatttggtagagacaggatcgccctgttgcccagattggtctctcaaattcctgagctcaagcgatcctcccatctcaccctcccaaagttcttgggattacaggcgtgggccactgcgcctgccctgctctcttttttgagacagagtcttgctttgttgcccaggctggagtgcagtgttgcaatcttgacttactgtgccctcaaactcctgaggtcaagcaaccctcctgcctcggccttcaagtagctagcactgcaggcgtgtatcactatgctcagctaagttttttatttcatagagatggggccttcctatgtgagaggaggcctagcactttgggagtccaacggtatgttgtgttcttgagatgaggtctcactctgtcacccaggctggagtgcaatggcataatcttggcttactgaagcctccacctcccgggctccagcgattctcctgcctcagcctcccaagtagctgggattacagatgcgcacctccatgcccacctcggcctcccaagtgctgggattacaagcgtgagccacacgcccggcccctatacagttttttttttttttttttcttgagatggatgctcattctgtatcccacgtccgacataggaggctgcggcaggagaatcgcttgaacccggctggtggaggttgcagtgagccgagattgcgccactgtactccagcctgggcgatagtcagagactcagtcacaaaaaaaaaaaaaaaaaaatttgggctgggtatggtggctcacgcctgtaatcccaggactttgggcggctgaggcgggcagaacacctgaggtcaggagtttgagatcagcctggccaacatggcaaaaccccgtctctactaaaaatacaaaaattagctggacatggtggcagatgcctgtaatcccagctactcaggaggctgaggcagaaatgcttgaacctgggaggtggaggttgcagtgagccaagatcgtgccattgcgctccaacctgggcaacagagtgagactccgtctcaaagaaaaaaaattttttttatagagatgggggtcttgctatgttgcccagtttgctctcaaactccgggcccaaaggatcctcccaccatagcctcccaaagtgttaaattgttgagattacaggcatgagacacagtgcccggccaagtgtcctaatttcttattgtcattgaattagagctcacaaatatgacctcattttactttaattacccctttaaacacgctctttccaaacacagtcacgttttgacatgctgggggttaggacttgaacatatgaattggaggagacccattcaacccataacagagcatttctccactccacgcaaattctttgtaggacgcagaagccagcactgcaccagccagccagaatcccagaactgtcctttgacagtggaggctagagtgcccaggaatgcatgatgggggacccagctctgatctgggggtctcagagcctgaggaactgactggcagaggtctgcggggtgaatgcggtggaataagtgactggaggatggagggggttccaggcattgggcacgtgttgaggcctagaaatgggagacctggcttcaagaaggcccgagaggccaggcgccgtggctcacgcctgtaatcccagcgctttgggaggccgaggtgggcagatcacgaggtcaagagatggagactatcctggccaacatggtgaaacctcatctctaccaaaaatacaaaaattagctgggtgtggtggtgggtgcctgtagtcccagctactctggaggctgaggcaggagaatcacttaaacatgggaggcgaaggtttcagtgagccaagatcatgccactgcactccagcctggtgacagagcaagactccgtctcaaaaaaaaaaaaaaaaaaagggcccaagaagagggcagtgagagtaggcattcgggaggaggtgtggtctccacccaagagacaccctctatccaaccctcgtcttgttgttattattttgttatttgacttaaaagcttatttttctttttcttttgagatggagactcactcttgctccggctgtgttgcagtggcatctcggctcactgcaacctccgccacatgggttcaagtgagcacatccggctcattttgtatttcttttttttttttttttttttgagactgagtcttgctctatcgcccaggctagagtgcaatggcccaatctcggctcactgcaaccattggctccctggttcaagcgattctcctgccttagactcctgagtagctgggattacaggcaccgaccaccccgcccagctaattttgtttttctctttttttttgagatggaatcttgctttgtctcccaggctgcagtacagtggtgtgatcttggctcactgcaacctccgcctcccgggttcaagaaattcttctgcctcagcctcccaagtagctgggactacagtcacatgccaccatgcctggctaattttttgtatttttaataaagaaggggtttccccatgttagccaggatggtctcaatctcctgacgtcgtgatctgcccgccttggcctcccaaaatgctgggattacaggcgtgagccactgtgccccgccttctttgactttttgtagacaccagggggtgggtcttgaagtcctgagctcaaggggtctcctgccttggcctccccaagtgctaggattataagtaaaagccaccagccaccatgtgcagcctgcaaatgttacttcttttttttttttttctggaatagagcctcactctgtcacccaggctggagtgcagtggtgcgatctcagctcactgcatcctctgcctcctgggttcaagcaattctcctgcctcagctcccgagtagctgggattataggaacctaccaccacaccctgctaatttttgtatttttagtacagacgaagtttcaccaagttggccaggctggtcttgaactcctgacctcaggttatccacccgcctcagcctcccaaagtgctgggattacaggcatgagccaccgcgcccggcctgcaaatgttacttctaacaacagcctttgaatttgtgagaactcagtgctgggtccccgtcccagcagcgtgaagctcacacgggagttggaaagagtccagggttccacactggcctgctgaagatcccgagtgtcatgtttttgaggttttttttaagaaacagagttggctgggtgcggtggctcacgcctgtaatcccagcactttgggaggccaaggcgggtggatcacctgaggccaggagttctagaccagcctggccaacatggtaaaaccccatctctactaaaaatacaaaaattagccaggcctggtggcaggcacctgtaatcccagctactccaggggttgaggcaggagaattgcctgaacccgggaggtggaggttgtagtgagccgagattgcgcctttgcactccagcctgggggacaagagtgagacttcgtctcaaaaaaaaaaaaaaaaaaaaaaaaaggccgggtggctcacacctgtaatcccagcactttgggaggctaaggtgggcggatcacgaggtcaggagattgagaccatcctggctaacatggtgaaaccccatctctactaaaaacacaaaaaattagccagtgtggtggcgggcacctgtagtcccagctactcgggagactgaggcaggagaatggcgtgaacctgggaggcggagcttgcagtgagccgagaatagcgccactgcactccagcctgggctaaagagcaagactccatctcaaaaaaaaaaaaaaaaaaaaagggtctcagccaggcacagtggctcatgcctataatcccagcactttgggaggctaaggtggcggatcacgaggtcaggagttaaagaccagcctggccaacatagtgaaaccgctgtctctactaaaaaatacaaaaatcagctgggcgtggtggtgagcgcctgtagtcccagatacttggggaggtaaggtgggaggatcacttgagcctgggaggttgaggctgcagtgagccgagattgcaccactgcacttaagagcctgaacaacagagtgagaccctgttttaaaaaaacaaaaacaaggctgggcacggtggctcatgactgttattccagcactttggtaggccaaggcaggtggatcacctgaggtcaggaattcaagaccagcctggccaacatggtgaaaccccgtctctactaaaagtacaaaaattagtcaggcatagtggcaggcacctgtaatcccagctagtaaggaggctgaggcaggagaatagcttgaacctgggaggcagaggttgcagtaagccgagatcgtgccacactgcactccagcctgggtgacaagagcgagactccgtctcaaaaaacaaaaacaaaaaacctatggctttcacatgtttccttttctaaatgaggtcctgagtatgtgggactacaggcacaaaccattgcacctcgctaattttttttggtttttgttttttttggtagagatgaggtcttactatgttgcccaggctgattttgaactcctggcttcaagcagttctcctgcttcagccttccaaagtgctgggatttcaggcgtgagctgtcctacctaattttgtccagcctaacttttttttttttttttattttggagatgaggtctggctatggtgcccatgctattcccaatctcctggcctcaagcaatacagtcacctcagcctcccaagtagctgagactgtagcccgaactgccaaaccttgcatcacaccctcctgtctctctcttttttttttttttctgagacacggtctccatctgttgcctcagctggagggcagatgatggctcactgcaacctccacctcctggctcaagtaatcctcccaccttcagcctcccaagtagctgggactacaggtgtgtgccaccatgcccagctaatttttttaatttttagtagagatggggttttgccctgttgcccaggctggtctggaactcctgacctcaaagaattcatctgcctcggcctcctaaagtgctagaattacaggtgtgagccacagctcctggtacatcacactctatcctcaggttcaagtgtctctgcctggcatccagtgtcttccaggaccagatcccatctcccatggtctatcccaggcttcctggtcagctcagagttcccagaatatgaaatctccaggcctttcacttggaatgtcctccatggcttgattatctgactggagatcctttaaagacttgctttacttccttgaatgcttgttcctcctccttgtcacaataacacagtctataacatcagtaacccagtatgtaacatcatccaccagaagcaatcataatagacggtctacattcattgagtgataattgtgtgccacactttctaagcattttatttgacatcccccccattggaggtggagtctatgatgcctctccttgaatatgagctggcttcagtgactcactgtagtgaataaaaagtgagagatgtcacactgtgtgagttccaaggttaagtcatcagaactgaaacagatcccacctggcttgctctcttgggatatttcccttagaccgtagctgccatgttgagaggaagcccaagccacagagaggccatgtgcagatattctggccaacagccccagcagaagttcaaggcaacagccaacaccaactaccagatatgtgagcaaggaagccttcaacgtgattccagccccagccactgtgtctgcaagtatatgacagatcttcaggaagaactgccaagctgaaccaagtcaaaccccagaaccatgaaagatagtaacttttttttttttttttgagatggagtctcgctctgtcacccaggctggagtgtaatggcgtgatctcggctcactgaaacctctgcttcctgggttcaagcaattatcctgcctcagcctcctgagtagctgggattacaggcatgcgccaccacacccggctaattttctgtatttttagtatagatggagtttcaccatgttggttaggctggtctcgaactcctgacctcgtgatccacctgcctcggcctcctaaagtgctggttgttgtttctttttttttgttttgttttttgagacggagtctggctctgttacccaggttggggcgcagtggcatgatctcggctcactgcaacctctgccttatgggttcaagtgattctccagcctcagcctcctgagtagctgggattacaggcacgcaccaccatgcccagctaattttttatttttagtagagacagggtttcaccatgttggccaggctggtcttgaacccctgacctcaggtgatctgcccgcctcggcctcccaacgtgctgggcttacaggcatgagccactgcactcagccgataatgacttttttttctgagatggagtcttgctttgtcgcccaggctggagtgcagtagtgtgatctcagctgactaaaacctctgcctcccaggttcatgccattctcctgcctcagcctcccaagtagctgggactacgggtgcctgccacaatgcccgactaattttttgtatttttagtagagacggggtttcaccatgtcagccaggatggtctcgatatcctggccttgcgatccgcccgccttggactcccaaagtgctgggcttacaggcatgagccaccacgcccagcctagtgacctttttttcatcactatattggaattgtttggtatgcagtgttagataagcagaaaaacttgcactaactcactgaattctcctttctcaatcctgtgaaaggaatgcatttccgttttattttatttattttattgtaatttttctttttgagacaaggtctcaccctgttacccaggctggagtgcagtggtactgtctcaggtcaccacaacctccacctcctgggttcgagtgattatcctaccgcagcctcccaagaaactgggattataggcatgtgccaccacagctggctaatttttttttttttttttttgagacagatccttgctctgtcacccaggctggaatgcaatggcacgttctctgctcactgcaacctccacctcccaggttcaagcgattcttctgcctcagcctcctgagtagctgggattacaggtgcgccccaccatgcctggctaatttttgtattttttagtagagatggggtttctccatgttggtcatgctggtcttgaactcttgatctcgtgatctgcccgccttggcctcccaaagtgctgggattacaggcatgagccatcgcacccggctgcctggctaatttttgtacttttggtagagacggagtttcgccatgttggccaggctggtctcgaactcctggcctcaagtgaatgaaccacctgcctcggcctcccaaagtgctgggattacaggcatgagacaccgtgcctggcccacattcccattttaaagatgaagaaactgaggctcaatctgggcaacgtgtgaaaccgaagttacagcataagtaagtggtagagctgggttgtgaacacaggtggacgctacacggggtcattcccaccaaattctgtagtctgtacatgtataatatggggtcttgggcaggaatggtgacttgtgtctgtaatcccagcactttgggaggccgaggcaggtggatcacctgaggtttcgccaacatggtgaaaccccatctctactaaaaatacaaaaattatccagatgtggtggtgtgtgcctgcaatcccagctactctggaggctgaggcacgagaagcacttgaacccaggaggctgaggttgcagtaagccaagattgcaccactacaattcagcctgggagacaaagctagactctgtctcaaaaaaacaaacaaacaaacaaaaaaaacgccaggcgtggtggctcacacatgtaatcttagtactttgggaggccaaggtgggtggatcccctgaagtgaagagtttgagaccagcctggccaacatggtgaaaccctatctctactaaaaatacaaaaaattagctgggcttggtggcaggtgcctgtaatcccagctactagggaggctgaggcaggagaatcactggaacccgggaggaggaggttgcagtgagctgagatcctgctattgcactccaacctgggcaacaagaacgaaactcagtctcaaaataaataaataaataaaaagctgggatctggcttttgcccaggctggagtgtagtggcaggattatagcttactgtagcctcaatgttctgggatcgagtgatcttcttacctcagcctctcaagtagttgggagtacagcacatactaccagggccagcttggtattctgtgtctgcatgtcttattattattattttttttgagagagaggctctcactgtgtcacccagactagagtacagtggtgtgatcgtggctcactgcagccctgaactgagctcaagcgatcctcctgcctcagcctgctgagcaggtaggaatacaggcacgggtcactacactgggccaattaaaaatattctttttctttttcttttttcttcctttctctctctctctttttttttttgtggagacaggttctcaccgtattgcgaagcctggtcttgaactcctgggctcaagcaatccaaccacctcagcctctcaaattgctgggattacaggcatgagcctctgcacctggccttgaagtgtgtcttgaggcctatacaagttaggcagcttcttggcagccctggtggcacacagtgggaaggaacccctcctgcccttgtcagcccctgttctgaccccctctccatttccaacaactgggtattcccagttatgttgactgctctagggcacaggctatctatcatttacactctagtatgagtcagtcactacttctagggtctgaggattagacgtgagacatccgttactttctggcaattctccttccgacttatttccccaagaagcagccacactcgtcacgtgctctagctggcgactttattcaaaggggagagggaaaagtgagagagttgggtcatttctgggataacctggagaggggtgggtctctggagctccagggaggagggacagacatctcaaaactattacagaaggccgagaggacgaggggtggggttctgggtgtcctgaggggcggggctgggggaagggtcgctcccccaactcagggccacgcgtccgctaggggccgctgccgcttccactgccactcccgctgcccgcagcgtccaggatggaggtgcgagggctgcgggaacgccgggagggagcttcccggccccgtcgtcctggtctgggacgaggtaccgcggagatggagatgttgaagcagtgacgggctccaggagcagccaccggtagggcgtggcccagagccgagcgacaaaggtccgtcccgtctgcgaaggtctaggaaaaagtggagttaaggccctagtgggcggagtccagagacgtggggggcgtggcctcgggaagggaaaaatgtgtaaattccttagggattggggtcagagccggagcgtgcggcctgggagtctatgtgcggaacgtgagtgggggcaggtccttggggagggtgaatgttcttactgggccctagcgggatgaatcagggttggggcagttggggggcgcgcagagaggtctgtatcaaggctggggttttgtagagagtgactgggcttctgggtcctccagggtaaaatgtggatggacccagagcaggaatggtttcttgggaagggcaaatctggacttcgagagcttttggggtcaaagggcacaacccagtaggaggttgggctagggaagggtgggagcagggacctggggagtaccaatccggtctctggggtctagacacggtaagaaagaacttggtgggggccgggggcggtggctcacacctgtaatcccaacactttgggaggccgaggtgggcggatcacctgaggtcaggagttcgaaaccagcctggccaacatggtgaaacgctgactctactaaaaatacaaaaattagctgggcatggtggcatgcgcctgaaatcccagctattcgggaggttgcggcaggagaatcacttgaaccccggaggcggaggttgcatcgagctgagatcgcgccactgcactccagcctgggtgacaagaatgaaactccgtctcagaaataaataaataaataaataaataacttggtggggaggatctcagtctcttcccttcaccttctgccccacgctcacctgtccataggtaaggcagctgggctcacagccccttttttctgagagtgggagccaagtcgggccgcaggtgatatcatcttcgcagttggcgaacctggagatggcgagtggagaggtgggtaaagcctttgtagttacattccagcgcgattctggctcttctagactgtgttcactatatgcccccacctcggatccaggccccgccttttagaaccactcccctgctaactaaccccatctctccagatttcaccctgccccatattctatcagatctttccatactctgggccacgtcacaactggccttgtccctacagacctcagaccattagttacaggccagtccctcatattttcccactctttcgttttccttttatttatttttgagtcagggtcttgctctgtgactcaagctggagtgcagtggcgtaagcatggcttatggcagctttgacctcccaagctggagcaatccttccacctcagtgtctcaagtacctgggactataggtgcgcaccatcatgtccgattaattttttttttttttttttttgagatggagtcctgctctgttacccaggctggagtgcagtggcccaatctctgcttcctgcaacctctgcctcccaggttcaaacaattctcctgcctcagcctcccgagtagctgggattacaggcgcccaccaccacgcctggctcatttttgtgtttttagtagagacggtgtttcaccacgttggccaagcttgtctcaaactcctgacctcaggggatctgcccaccttggcctcccaaagtgctgggattacaagcatgagccactacgtccggcccatgtctaattaatttttaaattttttgttgagactgggtcttgccatgttccccaggctgatcttgaactcctggcctcaaccaatcctcctgccttgacctctcaaacgactgagattacaggcacccacccttttaccttatcttttcaatcaagaggactcactccttaagaaatctcagggcctggctgggcatggtggctcacccctgtaatcccagcacttcgagaggccaaggcaggcggaccacctaggtcaggagtttgagaccagcttggccaacacggtgaaacaccgtctctactaaaaatacaaaatttagccgggcgtggtggcggaagcatgtaatctcagctactagggatgctgaggcgggagaatcacttgaacccaggaggctgaggttgcagtgagctgagatcgtgtcactgcactccagcctgggcgacaagagcaaaactccatctcaaaaaaaaaaaaaagaaaaaaaggccgggcacggtggctcacgcctgtaatcccagcactttgggaggccgaggcgggcggatcacgaggtcaggagtctgagaccagcctgaccaacatagtgaaacctcgtctctactaaaaatacaaaaattagccgggcatggtggtgtgcgcctgtaaccacagctactcaggagggtgaggcaggagaatcgcttgaacccgggaagtggaggttgcagtgagccgagattgcaccactgcactccagcctaggtgacacagtgagactccatctcaaaaaaaaaaagaaagaaagaaaagaaaagaaatcgcagggctatgaaaagccacattgccatatggcaggtatcttaaaagctgggggcttctcatgcctcgcccctatctacctgggctctaaacattaagctgcatctcttaaaccttggccctgttggaggccactcccctttacacagaaggccaagcaaactgcaggctccgccctcttccccgcccaagtcacaacccacgccccttgcccccgcgtctcctaccaggcctggcagagctcctcgcagagcggctgtgcctggcgtacccccaatagccgcaggcggaagcgactgcgaagggcacgttggaggtgttccaggaaggattcgcatctggacgttgggagagatagggtcggatgggtcaggacccgagggagttcctgggcaatgggcaaagtacgcgagaaaacggtggagggtgctgtactcactcagggctcggcactccacagcgttctggatggtttccagggcccgatgtctctgttgtgtccatctctgagggacaacaaggtcctggcaaaggggaaccctgtgagctagggtcttggatattcaggtaaggtttgggaactgaggcctggggatcccctggacaggggagacaacaattacatcaatcctcacaaacccataacttaagacccttcctttggaatgcaaatgcagcttcaagtagtaataatcatttcttgtttataataatcaacttacttgtcatgtgcctggtagtgacacatatacttaatccttttccttttttttttttctttttttcttttgagacagggcctcactctgtcacccaggctggagtgcagtggcgtgatcttggctcactgcaacctccacctcccaggttcaaacaattctcgtgcctaagcctcccaagtagctgggatttcaggcgcatgccacctcgtccagctaatttttgtattattagtagagacaggggtttcaccatgctggccaggctggtctcaaactcctgacctcaaatgatctgcccactgcagcctcccaaagtgctgggattataggcgtgagccaccgagccctgctcatatgcttatatgcttaatcttaacaacagctctgcgaggtatatttgttatttctctctttttgggggtccatgtgagacccagagaggttaaatgacttcctcaggatcacacagctacaaagtggcagagttgggatttgaacccaggcagtctaattcttatccaccattcttcagcactatccgtgcctcccaccttggtggccatgctaggcccctctcataaggaaattctaacattgtcatggcagggtaggtgtgggtttctgggtgttggtggtgaggcagggtctggggtgctcacctgccaggtgcagcttgcctttgcccagatcagctgccagcccatggtgttgctgggacctggcttggagtgggcggctccctccacaggcttctagcaggatccatgccaaggtcagttgcagcacccacgtcaggccgatgggtcgcatgtggaccctgcagtccatgtccacctgagataagagctggcaggcatagggtggggttcagccatccctttctgtgagcttagggtggcacccacccagtgcatacccaagaagcagtgccaggcagagtagggaaagtgcagctgaggaggaggctggggcagtggccaaggacgttcaaatcccaggagaccatcagggcctgcctccaacctaggagcccccctcccatcagaaccatgtcctctatgtcccttcagtgccaccccaaccaagcttagaccacagtggccctcctcccatccagcaggatctcccacctttttagtcttcaagagaccccttcttttctcagaatgaaggggacctccctaggtcttccaatccccctctcctgttcagtaattcctccctctcttctatgcggcctccctcctccctctctcgctccctgccggcccttctctgggtcaccttctctcggcccacaatcggcttaggggccacccagagctggacctttgggaccaaggctggtgtggcagggctcaggttctgtcactggggcccaaagccccgaggcagggacagctagcggtctgtggagacaagactgtccccttcccgcctccccgcattcagcccctcacctgttggctggattggggtctagaggccgctaagacacctcaggatccagtccaggaaactggctgctgaaaggggcgtggcttaatgcaggggcgggacctcccaccgtcctgcccacactccagctgaccaaaggctggccgacttggggctggtgtgtatatatccttgtgtttgtttttatgttcagcttgtggcttaagctctgtatctatatatgtggggagtgtgtgtgtgtgtgtgtgtgtgtatgtgtgtgaggaaggtgtgtttgtgtggcctatagcctgtgtgtgttcccaggcacctgtgtcttttgtttgtgtggctgtgtgtgtgttgagcatgtatgtgtgtttttgttgtatgaggttatgtttatgtgtgtttcttggtggagtggttgtgtgtgtgtgtgtgtgtgtgtgtgtgtgtgtgtgtgtgtatacgttcagaatctgggggaggattgtgtgtcccaagcaatgtgtttgcagttgaataaaacaggatcttaataaatgtgagaaggggaaatgtagcattgggttagtgtccctgcaaaaatgttggaagtcagtggataaaggtttttgaccatgaaggttgaccatgaatgaacaaagaaatgtcatgtgctgagcaggatgtgtttgtgtgcacacattatgtgtccttctgaagtttctgtgaatgtgtgttgcttgtgaacactcctttaactcatccattcattcaacaaacatttattgagcacctactgtgtgctagattctggggatgcagtagtgaacaagacatgaaaatttcagccaggcatggtggttcacacctgtaatcccagcacattgggaagctgaagtagaaggatcgtttgagcccaggagtttgaaaccaggctggccaacgtggtgaaaccccatctctactaaaaataatcaaaaatagctgggcatggtggcacatgcttgtaatctcagcagttcaggaggctgaggcatgaaaatagtttgaacctgggaagcagaggttgcagtgaatcaagattgttccactgcactccagcctgtgcaacagagtgaaactctgtctcaaaaacaaacaaacaaacaaaaactcaaaataaaagacacaaaaatctcaggtttcatagagctgacattctagggggagaatcagatgagaaaaacatccctgcagagggtatgggtgtgtatgtctatgtgttgtgttgggagaataatttgtctgttttagatgataatttgtgtgcaactggacatcccttggttttggaactatgtgactgtgcttccattggttaagtgtttatatgtgttgtttgtgtgtgtttgcattggatgactgtgtgtatgtctgtgtttcctaagtatgtgtttgtatggctgcagatgtgagtttgtgtgtatctgtatttttggatgtttgcgtgtgtctgcatttgctgagtatgtgtttgtatgtgtgttaatttgcagaatgtgtgggtctgtgtttgtggagtatatgtttgcagagtatgttcgaataaatgtttgtgtgtctgtgtttactgaatatgtgactgtgagtgttcgtgtgcctctcatctcagggcaagagaggcttttgtctctcttttattgctgtattccctcccagatcccaaaacactacgttgcacacagtaggtactcaatatgtggtaagtgaacaaatcagtagataccgtctctgggtccctctgtgtacacccagtgatgtgctggaggcctcagtaagcaagacctgccggacctagctttcccctggtccatcttgaggtggtccaggatgcttgtgggtcagatttgttcagcctctgggctatgcctcacgccagagcctccgcaccctttctccttccctaatctcagcccccgaccctgcgcttggatttcagcaccgcggacaggagcgcgcgagaccagcaccaaggagagctcccgcggtcgccatcgtgagataggtcgccaggggcggagtccgggccatggacggagagatgtgccagcaagggactcagcgagacggcgacacaaatgtgccgacaaacatatacagagacagacagagataacccaggcaaaggcgcggacttgaggcgacaagctcctggtgaatacccggacccagcctcgccgtcgcccccgtcgtccagcaggggtcgctgttacccagcgaccgcgccctccgggaccttggggccagatactggccaccaccccttgggaagcccttctgtcccccagtgccaagactgggagttcggagggctcggacactctcctctccaactttgggaagcatggtgggtttggcctcacctgtgtgaacatggaggagcggcgagggagctgaaaagcgctttaactgcccccctctccaactaccagctaatcgctcctataaatacagacggcctggcctggctccttaatcctgaccgtgagggaggggtcgctagaggggctgcagggttccctgaggaggctctgattgtggggcaggtgggtgggggggcataatatgtatgcacatgtttttctgaggttgcgtctcctgtgaagacgggtctcctcagtgaaaatgtttctctgtaagcatgagatctctcctggggctgtagaggtctcgtgggtggggacagtttcccacagaggatatggcttttaggggtctctgattgggggtatcctttacacgggaattgttactcctgggatctttctcttcggggaatgcctctttcgtggggagggggatggcttttgagaggaaagtcacctctcagggaccatatctattaggaatgattttcagggttgggggagttcttgattggacagggcgtccctgtggaaactatctccccctgggaatgtgtctcaccaagggggtctctgggggatgaatgtagagggaatgtatctcagggagaaggcttcctttggggtgtttcttgactgagggttctacccctgagaatatctctcctctggggtgtctctttttatagtggtctctcggcagcttggctcccatgggggcaccaggaggctccgcccccccgcccgccccttccccccgccagcgcgggcagcggtggctgagcccgggctcgggcgcccagacgcagtgacggcgccgggcccgccccacttcgctccgcccccgcccccgccacccctcccctcagccgccgccgccgccgccgccgcggtccccgcggcttctcactccctccctcctccctcctcccgccgccgctacctccctcctccctccccgggccgaagtcgccgccgctgccgccatggacgattcgggcctcatccgccgccggaggctgcaggtacgcggctgcctgggccccgggtggagaggaaggggtcggcgccctggggcggggctgggcaggaggcgggagaacttgcactagggtcagccgggacgcccccacccataggttcgggacgctaaccgcggggaacgctgtggccgcgcgtcccgccgcgctggggaccccgcccctcaggcgccgcccggcgatccagggagctgccggaggggtgcagcctagcgctccccctcgaggatcgcctgaggggcgcctggcccgccctagggggatggggctggggccgaagtcatcgccctggcgcctcgccaggctaggggtgagggggcgcagagcaaagttattgccctagggctcatgcccctcggggccatcggcgccgctggaggcgtaaacatgtttgtgcggcaacctcgcccctcaccaccccaggagccccctcccgaggcataggacgccctgcgtcccccacgcacctgcctggccatcaggattcttcctactgccctaattggacaggcacctagacagctttctcactcttcattccacctcctccactacaacatccgcccccccaccgcgatcctcaagtccagcccagcttgtgggtgggcgggagcgatttttagctccttgcagccttagaagatgctggtctcgaggctgcgcaggcgcaggagccgtgcgtccactgcacggagtgggacactgaggatcgctgtggagtgtggggaaggcggggacaaactcaggtgtcaggagctcctacctccaaggtggggagggattctgtagccgagaagcgtcctctgctcgtcttcagctgcgtttctgaggggttagtacggaagttcagggttaatacggaggtccggtcccaaacatcccagaggggaaggtgatgatatctgtgccccaaggccctgcctggggtctggcccttctgagcctccttggggctcagccccaggcttggtaatctggagtttagataaagccgagaatgggcccagactcaggctccatccccagcctgaatcttgggaaaagaggattcaaaccctcacctagggcttcgtccatttctagactcccctaatccatcattcccgaggttgaaggccaaggggagctgattggtcagtgcagcaggaaaaatggtgatcagactgcaggaaggaccttccaggcgtctgggtaacgccggagccagacatgagttggaaaactaatttgctttcagagcccagatggcccgatctccggagcctaggcctctctgaagtgctcccacattctctccgcctctcgggggtgggttaggagagtgggttccgagagaagggaggcagctgcggcaaagttagagcaagtactgcagcagccaggttgggtccgcgccgtcgggtttctgagaaaagggaggaaagaggcggggcctgcacggtgtgtccccgccctccaggccggcgtcaactctcattggctcagcgccacgcgggactttaaactcccgctcgagacaccgcccccaacgcggaatgcttccactcacccacccacccactcaaccccaggcttgctctgggtccggcgatccctgtcggagtcctgtccccaccgcttcccttctggcgggattaaccacttcgctgcctggatacacccacatacgttggtgcatcctcttaggaactgtcgcatcactgctgagcgcccgagggtcccctgtgtgcagctaggctcttttttttttttttttttttgaaacggagtctcgctctgttgcccaggctggagtgcagtgacgcaatctcggctcactgcaacctccgcctcccgggtttaagagattcttctgcctcagcctcgctagtagctgggattacaggctcatgccaacatgcccggctagttttgtatttttagtagagagtgggtttcaccatgttggccagcctggtcttgaacttctgacctcaggtgatccacccgcctcggcctcccaaagcgctggaattacaggcgtgagccaccacgccctgggatcttatatgtagacagcatcctgagttcgaatgccctgtctgcagtgtcaactattaatcctgtgcgggagaagcggaatccacttggccgagcggctctgcagctgagattggaggtggcgtctgtttacactgacgccaaagacccgaacttccgccgctccagtttgaccctttcttcgtccctagaatgtttgggggcgctagcgggtggggctgggttccaggtcttcttcgggtggtgcttaaaagccctccaggggcttaccctccaaggccggttacccggatctggacaccctgggctctgtggccagaaaatccaggtcttgatttcgcttgggccattgcagacacgcagccaggtcgactggtcctcattcactccggtcatgcaaagacagagggaaaacctggtttggattatcggtcacccgtggctcgggagggcagggctgccctttggccccgcctatatgtttgtccgttgtacaacggggtgggaggacgctgtggcccatcctctgtcatgcagcatgtccctccttaataacgcctgttctccagacttagtatttattgagcacttgctatgtgctaggcaccatgctaaggggctaggcatctgcatcaactcctaagatcctcaaggagacacgggactattggaaggtcatttgccaaggtcataaaaagcagaattgagatttgaacctaggctttttgcttttagagatcctagaaatgtctaggacatccctcattttccttttgttggagtcccctccaaaggccttttgaaactctcccccaaatctttccacctgcagccccactcagtttccttccttccacctcaccctgtggatagaaaactggctggcaggtgttgccccttgtaccccattcctttcctcagaaaaaagccaagaccccatatctcctgatccctacagtgacttcctaagagcttgacaaatggaaggtgaccttcttcaaatgcagacacataaagttaatactcactaattattattattgtcattataaaaaatgactatgcggccatcacctgaatttccatttttatttttttattttttaaactttttattatttatttatttattgttaattgagagggtgtcttactccagcagtggtgcaatcatagttcactataacctcgacctcctgagctcaagagattctcccacctcagcctccgtggttcccattttaaatctcagttgtgagtcactctacttacctaccccccaccccctaccccaactctatgactctagctgggagtcagatagatctgctgaggtgtagatgagtcattcattctttcaacctttcattcattcaacctttcattcattcattgagtacgctaagcttattcccgcctccaggcctttgcccttgcagttccctccacctggaatgctctctccacagatcctcccatggctggctcttatctttcagcaaccagcttaaaagtcacctccacagagcagccctgtctgacaatgtgtctccatcctagccattgtccatcacatcaccctgtttaatttattcataagactaattattgtctaaaatgatttcgttcacttctacactaatcttgtttaatgtcccctttaccctataaatactagtcccaaaaggccagaaacttttttttttttctccttgagacagagagtcttgctgtgttgcccacgctggtgtttccttggactcaagcgattctcctgcctcaacctcccaagtagctgggactagaggtgcacaccaccacaccggacttgtaatttattcactactgtgtccctagtgcctaggattgggtcagcatacagtaggtgctcaagacatatttttcaaataatgattcctatttcatttgcacaaacacacgctgatatgccaactcacttgcctttatatggcgccccgcctgtgtacgtgggcctctgttggtctctgagggtcaggagaggaatcacccagggatcctctcccccaagaaacttggcccgcagtgcatggccaagggtgaaagtgacagtgctgaagaggggcctgtcttaccctgcttctgctcctccagggagttgataatgcttgtgggcagcaacggcaggtccacgctgaccttcatcgttttgcccctttgccttccagaaggatttgcccctgccccggaaaagcagcaggtgagcctggggagagacgtggcgggggctggccgccccttctcccgccggggtgggggcgccaggcgagtgcgcgggcggggcctggctcgccggcacgcagcagcgccccctcccggccggctgcagccgcagggccctccccttccctgccctcccctgcccgctgcggcggctgcagcctccgccccgcgcgcttgctccccgcgccgccgccgccgccgcctccgccgctgctgccgcacctgccaccatgtcgccgccgccgggtcatgtctgactctctctggaccgcgctttctaatttctcgatgccctccttccccggcggcagtatgttccgccgcaccaagaggtagacccccgatcccctagacattgtcccggccctccccgcaaaagccgccgctccgggtactgctgcagggcggggcccgggatgctgcgcccggtccagctgcgccagaggtgccccagctgcgccttcccgccggggttggggttgaatggggggtggtgtgggccgagtctggggggcttgcacgctggagaggacggccgcggggggagggggctgcgccactgggggtttgtggcgcctttgtctgctggcgctgcgggctccaacagcctggtgggggtagaggaagaaggggaggctggggggcttggcaccctcagaacaatagccgcagcctggcctccccccacccccatgccgcgtgctcctggacgcgctaatatgctcagtcactgcggctgtgggtgaggggacggacggaggggcttggggctccctcttcgggagctggatgctgaggggtagaaaaaagggggggtttatcataacacaacccccccccccgaacacagccttacactgaaaatagtgacacacagcgtcacacaggacatgatgtcacacacatacacacaacagccctagtggcccagatacactgggaggtgccacacatacctagccttgcagctgccacaggtcagaaccatgcacagacacacaggggcaccacgtcgtgtacacctagtaagatgtcacttacatggcgatccacacacacacagttatgtcatccaagatgcaaacatgtgtttcaatatcccatccatgcatccaagaatgtcacaacacacgatgtcatatctaggtatctcacatactatgtcacactgacatcaggataaacagatgtagggatcttgcagagacagaaccacgcaaaatcacatgttatcacattgcaagactcacctagagaatgtcaaatgtggtgacatgtttggacacagtgtcacaagatgttaaattcacacaatagatgctacatacacatggacaagcatggtgaatgtcacacccagacggaaggacagtatcggacacagactcagaatgccacacaaagacatagatacatgtaggggggatcatgcatcctggccaggcatggtggcaggcacctgtagtcccagctactcaggagggtgaggtgaggcgggaggattgcttgagcccaggagtttgaggctgcagtgagccactgcacactgcactccagccgggcgacagagcgagacattgatttaaaagaaaaaaaataataataatacaacctgcctgtgttacagcacacattgttatggacaagtggcatttcacactgtgtcacatagacacacaaatgctcaaattgtatcacacaagataaacccacgttgtgtcacacgtatcacactagaatgcattcagcgtcacacattgttgaattcatacagtggataccacacgtggatacctacagtgaatgtcacgcatagactgagacacgctcagtatcaccaatggtgtcacctagacacagtgactatcacaccatgacagacactgccctacacataatccatactgagagtttctcacacacatgtcatatgcacatcccctgccgtacacagtcctgccgaggcctgcaccacctttcttcgagaaaccctcccagggagcctccaaacacacatggatgggagataggcggggatctgagacaggaggtcagctggtggggctcaagaactcactgggctgcggcccggcccggcccccctgccttaccttccccgcagctgccgcaccagtaatcggaaaagcctcatcctgaccagcacttcacccacgctaccgagaccccactccccgctgccaggtcacctaggtgaggccagtggtagagacttggtgggtgcagactggcctacagtaggcggggcctcaggcgaggaagcgtggtcatgctacagaaggggcgcagtttgaatggaggcgaaccagtttggataaggggcggggccatgcttgtgtgggtgtggtcagtcgcagagggacggtcattggggggcggagactcaggtgggcggagactcaggtgggacggacagaaaggaggagtcgtacctgaggggcggggccatcccagatgaagccagaatcgtcttggaaggggccaggctgactcggcaacgaaaaaatttagagaggcggggccacaggcgaaggggcgtggtctccccataataggcgggactagactaaagacaggacatgctgctgtttgcacgccgctttagggaacgagagacctgacaggatttgccccctctttctctcataggcagcagtcccctggacagcccccgaaacttctcccccaacacccccgcccacttctcgtttgcctcctcccgaaggtgagtccctcccctccagggccccagaaccctgggcagaccctccccaaccactgtctgggccgccatctgttctcctcctaattgcacccgagctggggcctgaggggaccagcgagtgccccaaggtctcagcgggaaggagcgcctagccttcggggcggggcctataagaaggcggggtccaatcgccgatctggaacggggaaggcggtggggctccctttgcggcaggtcgaaagcgcgtgcgccctgggcgcggggtcttagtctctccgagccttgctctcctggccaggtgtttccatagcaacaggacggggcagccaagatgacgtgcgcaagcgcagattgcgcgatgcctatcgagggactcttggtccccgaggtgggggaggacgactagggctgtttctcaaggggaggaatctcaggtttctttccaagggtctcttagggtttctggggtgtccttaaatgaattttctatgggcctttggtgaaactgggggaggcagagaggtttctctgatgttttctggagaaacgtttctgggagtttgggcctgtctctttttctttgaactctattcattctaaaaatggtgtctaaacacctgctatgttcttaggagctgggcgtatggggtcaatgacgtcctgtctctaccctctgagtcgaatagggcaggcaggccagagaatggggatcagtgcaaaggctgatgaaggctgtgttgtgagagtcaaaggagactgtgaagacagacagctcccttgggaaagtgggggaaccgcctattgaccatggaatttagctgagggcaatagagagccaggacaaggctctgggatagggtctcacatgtttatccgcaagcggggaggactgagcgaggggactgctgggaggaagaaggaagggaggagtccaataaatggggtgtgtgtgtgtccttgtaactgtgcaaagtgtgctggtgtgtgtgtgtgattgtcactgtgtgagggattacgtgcctatgcaatggcacgagtctgcgaatgtgaacgtgtgaacatgtgtctgtaggattgtaagtgtctgtgaatatgtgagaggagcaagtcaggtatgtctccaggtgagcgtgcaatctgtgtgtgggtgtaagcgtgtgtgagtgtgtggctgtgagatagtaaacacagagtcacagtgtttactgtctctctctctctctctcttttttttttcttttcttgagacagagtctcgctctgttgcccaggctggagtgcaatggcgggatctcggctcactgcaatttccgccttctgggttcaagcgattctcctgcctcagcttcccaagtagctgggattacaggcgcctgccaccacgcccggctaatttttgtatttttagtagagatggggtttcaccaggttggtcatgctggtctcgaacttctgacctcaggtgatccacccgcctcggcctcccaaaatgctaggattacaggcatgagccaccgcgcccgtccagtttactgtctcacagccacacgcttacacatgcacatgctaatgtgtgttgtgcactcacatgagcacgcgccgatgtgtgtccctgtgtgtgtgcatctgcgtgcgagtgtgaatgagtgtgtcgctgtgtgcaagtttcaatgtgtggtagtgagcgtgggtgtctggaacgtgcatctgtgtgaatgtggaagtgtggagtatgtttgggtgagtctgtgtgtccgagtgtgagtactgagtggaagcacatgtgtctataggtgagtgcatgtctggtcttgcacgcgtgattgtgcattagtgtgtgagagtgtgatatttgggtccatggatgggatagtcaatacgtgtgggtgtctgtgttgaggagtcatgtgtgagtgtgtgtcttcgtgtgtgtgaagtgtaaatgtgtgcactgccagtatgtgagcctgacctgatagtcacaccaacattaatggatttggctgcaacagtgactgtgtctgtgtgcacgagagcataaggacacaatattctatgtcagaacatgttggggggtgggacgggtcttttttctctgagaagatccaagggtctccctcagagctttctcatggagagtgttcacttgggggaaatttctagaatctctctggaaaggcttcactgggtgggggcttttccagttctcggtgtccactctgaatgataagagaggggaccgtggggaggagagtggagacggatcctccctccaattcccggtgcctgcctggaagagtccctctttatccccttgattctgagggccttgaggaatcttagagtgcagatatattcccccaacccccaccctggccctggccagtggcttcacccacaccctgaggagttgggggaccgctggggccttgtggcctctgagcaccttggctgggttccagggcggacggacgccggtggtctctggcctcgctcccttcatctggctatggcaccaacacgcccagttccaccgtctcggtgagtgtggaaagtaggtgggtgggccggtgggtaaggaattcaggggccctccagcctgaagacccacacccaggccagcagtccaggctgggcttgatgacagtttagggccaggctcagtgactcaagcctgtaatcccagtactttgggaggccaagacagaaggattgcttgagcctaggagttcaagaccagtctgggcaacatagggagacccttgtccctacaaaaaattaaaaattatctgggcgtggtggtgcacacctgtggtccccactatttgggaggctgagacgggaggatcgctggagtctgggaggtataggctacagttgagctgagatcgcactgcagcattccagtctggatgacagagtgagaccctgtctcaaaagaaaaaagcaaaaaaagacagtttgggtttccccattcttcaaaggtgttcacttgtccatctattaaagagttatgggtccgccccactcagagcccaatgctctgccctcaacacatttctgggagggtccttcctactcatttctgactcactcatttacagctggtgacataaggctctgtgagttaagccatttactctgatatcagcagctgggctgggccaggccacagctttcacccagagcccacttgctcaccccttggaacacccaaagtcccttcatctgctcccttttctatccatgcccatagttcccttatccagccattggcatgatgttcagcagacatttgtcatgagattgtcatgtggtaggcgggttctgcaagctgggccagagtgtaaatattcacgcagccctcatgggggaagacaagccagtaagaaggcattcacaaaatagaatggtcagaactttgatgcaagtagcacaaggtgaggtgataggggagaggcatgtgactcagattggggggttgtcaaggaaggcttcctggaggaggtgacattgaaaccaagacaacagaccagcaggagtttggcagatggaagagaagggagaagagtgttccaggaaggggaagagcatgtgcaaacctctagaggccacagaacttgcagcatttgaaaagttgaaagtagctttgtggggctgaaaatttgggatgcgggggaggaatagagatgatgcaggcagtgaccttgatcaggctggaaccttgtcagccagggcagcaagggagattttattctaaatccagtggggaagccatggaatggttttatttctttatattaaattgtactaaaatttcagtttgaaccatttgaaattgtgattatgtaggctatagataatgcacactaattaaaaaaataaaagagatggatggggtggggaattttaaccagaggagtgagcaatgtgatgtttaaaaatatcattctggccgggcgcggtggctcatgcctataatcctagcattttgggaggctgaagcgggtggatcatttgaggtcaggagttcgagaccagcctggccaacatggtgaaaccctgtctctagtaaaaatacaaaaatgagccaggcgtggtcatggatgcctgtaatcccagctactcaggaggctgaggcagggagaattgcttgaacctgagaactggaggttgcagtgagccaagactgcaccactgcactccagcctgggtgaaagctatatgaccaggcatggtggctcacacctgtattcccaacactacgggaggttgaggtgggaggattgcttgagcccaggagtttgagaccaacctgagcaacgtgatgaaaccctgtttctacaaaaaaaaaaaaaaaaaaaaaaattagccaggtgtgatggcttgtgcctgaagtcccagctactcaggaggctgagatggaaagattgctcgagcccaggaggtgggggttgcagtgagtggaggtcgagccactgcactccagcctgggggagagagaaacaccctgtctcgaaataaaaaaaaataaaataaagcaagaggagagccaggcatagtggctcatgcctgtgacccagcaatttttttttttttttttttttgagatggagtctcactctgtcgcccaggcctggagtgcaatggcaccgtgccggctcactgcaacctccatctcctgggttcaagcaattctcctgcctcagcctcccgagtagctgggattacaggtgcccaccaccatgcctggctaatttttttatatttttagtagagacggggtttcaccctgttggccaggctggtctagaactcctgacctcagtttttctgcccgcctcagcctcccaaagtgctgggattacaggcgtgagccaccgagccctgccctcagtcccagaactttgagaggccaaagtgggagtattgcttgaagccaggagttggaagccagcctgggcaacatagagagaccctgtctctgcaaaaaagaattagccaagcatggtgtagtcccagctacacagaaggcagaggggggaagattactttagcccaggagttcaaggcttccgtgagccatgattgtactacatccctctagcctgggtgacacaaggagaccgtgtctctctctctttttaactttaaataattttaataaatagagacacagtttcactatgttgcccaggctggtctcaaactcctgggctcaaatgatcctcccgccttcgcctcccaaagtgctgagattacaggtgtgagtcaccatattcagtggagacccttctctaaaataataatgataataaagcaagaggaaacaagatagagtagggatagggaataatgggtgtgtattcagaggaggtcttcccgaggggtgacattgaagcaaaaatttgaaggatgagaaggagggatccatagtagatgtgttccaagcagaaagaatagctaatgcaaaggccctgaggaaggagcttgcctggcttgtccaaggaccatcaaggaggccactaggctgggtgcggtggcttgtgcctgtaatctcagcactttgggaggcagaggcaggtggatcacctgatgtcaggagttcaagaccagcctggccaacatggtaaaacactgtctctactaaaaatacaaaaaattagccaggcgtggtgacaggcacctgtaatcccagctacttaggaggctgagtcaggagaatcgcttgaacgcgggaggcggaggttgcagtgagctgagatcacactccaaactaggcaacaagaacgaaactccatctcaaaaaaaaaaaaaaaaaaaaaaaagaaggccactgtagctggagcagaggaagtaagcaggagagtgagaaaaatccacggcagggacccagggcaggatgaggcaggaccttgtataactggggaaggacttgggtgttcaccctgagtaaggtgggagccaccaagggttctgaacagaggaggctcatgacttgacccaagctttaacagactcactgtctccacccctgtctgtccctgtccacctgtctgtggccaagagtcccagccaagatcctaggatccaaggatcgtaaatcaggtcctgatcctggccttgcccagtgaccccatcggctttgggagtcccagctcagggtcctgagctgttggggggcccatggtggctctgaccccggccctgcccctgtccccagtcctcctgctcctcccaggagcgccttcaccagctgccctaccagcccacggtggacgagctccacttcctctccaaacacttcgggagcaccgagagcatcacagacgaggatggtggccgtcgctccccagccgtgcggccccgctcacggagcctcaggtgggcaggcatccctcctccttcgtaccaagctagtggtcttaggacttgtgcttagagagacccctgtccccgcgaataaaagggttacatcttggggcgggggctctctgcgggcttggaggcagaggactcgacaaaatgggcttctctccccgcagccccgggcgctccccctcctcctacgacaacgagatcgtgatgatgaatcacgtctacaaggagaggttcccgaaggtgaggtgggacccgaggcggtcacggggtgaccaggcggcctgcactctcgctcgccttatccccgcgcgccccctggcggcctcggtgcgcagcgcaggctcctggcggccgcagccttcgggcacagccccgcgcccctcctccgtccctcccgcaggccactgcgcagatggaggagaagctgcgcgactttacccgcgcctacgaacccgacagcgttctgcctctggccgatggcgtgctcagcttcatccaccaccagatcatcgagctggcccgggactgcctgaccaagtcccgtgacggcctcatcaccacggtctacttctatgaattgcaggagaacctggagaagctccttcaagacgtgagtgcacgcggaggccgggctgatctcaggctcagcaccgccagattgtgcccaatgcacccctttcttcaccccacatacattcagggagctcctaccacgttccaggcactggcgtggagctgaggactcaggggtggaagtggtcccttccctaggtctgaccgactgaagaggcaggaatttcacctcgctcatttcccttaggtctttactcaaatgtcaccttttcaggtggcttcttaggcggtccccagtcatttaaaatattaaactcggccgggctcggtggctcaggcctgtaatcccagcactttgggaggccgaggggggcggatcacgaggtcaagagatcgagaccatcctggctaacacggtgacaccccgtctctactaaaaacacacacacacacaaaattagccgggcgtggtggcggacgcctgtagtcccagctactcgggaggctgaggcaggagaatggcgtaaacccgggaggcggagcttgcagtgagccgagattgcgccgctgtactccagcctgggcgacagagcgagactccgtctcaaaaaataataatagtaaataaaataaaataaaataaaatattaaacttagccgggtgcggtggctcaggcctgtaatcccagcactctgggaggctgaggcaagtggatcacctgaggtcaggagttcgagaccagcctggccaacatggcgaaaccccgtctctactaaaaatacaaaaattagctgggcgtggtggtgggcgcctgtaatcccaactacttgggaggcagaggcgggagaatcgcttgaacctgggagtcggaggttgcggtgagccgagatcacaccattgcactccagtctgagcaacaagagtgaaactctgtctcaaaaataaataaataaatgaaataaaataaaatattaaactctactcacatttatcacccactttctcctcagtttctccttgacactcagcaccatccatcatactgtgtatttttgcttattttatttcatgtctatccttctccaatgtcagccccatagttggtgagggtgggggggtggagttgtctgttctgtccactgctgtgtccctgctgtttggaacaatacccagcacacagtaggtactcaataaatgttgggtaaattgatgcttgaatgtccctttgcagtggcatgcacctgtagtcccagctagctacttaggaggctgagatgggaggattgcttgaggtcaggagcttgagaccagcttgggcaacatagcaggaccccatctctaaaacaatttaaaaaatttaagccaggcgaggttgctcacgcctttaatcccagcactttgggaggctgaggcgagcagatcacgaggtcaggagtttgaaaccagcctggccaataaggtgaaactctgtctttactaaaaatacaaaaaagttagccgggcttggtggcacgtgcctgtaatcccagctactcaggaggctgaagcaggagaatcgcttgaatccgggaggcagtggttgcagtgagccgaggttgcgccactgcactccagcctgggcaacagagtgagattctgtctcaaaaaaaataaaaataaaaataaaaataattagctaggtgtagtggcacacacctgctgtcccagctacttgagaggctgaggcaggaggatcacttgatcattcattaattccaccaatatttatttatttatttattttattttttttggagacagagtctcactctatcccactgggctggagtgcagtggtgcgattttggctcactgcaacctccacctctcaggttcaagccattctcctgcctcagcctcccgagtagctgggatcacaggcacccaccaccatgcctggctaatttttgtatttttagtcgaggcagggtttcaccatgttggccaggctggtctctaactcctgaccttaggtgatccacctgcctctgcctcccaaagtgctgggattacaggtgtgagccaccatgcctggcccccaccaatatttattaagcacctactatgggcctggcactagcctaaaagctgggaaatcaactggaaataaaacaaaaattcttgtctttggagagctgacattctattaatagcaggaagagacagaagataaacaataggcgttagaagctaacccctgtaatcccagcactttggggagctgagacaggaggctttctggagcccaggagttgcagaccagcctgggtaacatagcgagaccctgtctctacagtaaaacaagtcaaacaaacaaagacccaataggtattagggctgagaccaggaccagggtaaagcaagtaattatttcttcccccagaacattaaattaatttttgaaaaacttgaaaagtagataaatgaaaacccaacattattttaagtttacatattttatttataaccaagccagaatgtgttataattttactgtcctggttttaatgaaagcaaactcatcaataatactattttcattgaaaccattagacattttcaaagacacattaaaacacatataggttggtgcatacttttttttggctcaagttacaatatggctaggcacagcctgttggattctgtctttatttaattttctttttctttttctttttcatttgagatggaggactctctatgttgcccagggtggtcttgaactcctgggctcaagcaatcctcctgcctcagcctcctgagtagctgggattataggcatgtaccaccacatctggcttaaattttgatattttggcttatgatagatttttggcattaattttaggcttttcaagtattgcaataagatattagttttttcttttctttttttttttttttgagacagtctcactctgctacccaggctggagtgtagtgatgtgatctcggctcactgcaacctccacctccctggttcaagcgattctcttgcctcagcctcccaagtagctggcattacaagtgtgtggcactatacccagctaatttttgtacttccagtagagatggggttttgccatgttgggcaggctggtctcaaacccctgacctcaagtaattcaccctcctctgcctcccaaaatgctgggattacaggcgtgagccactgtgcccggcctctttttcttttctttttttctttttttttttttgagacagggtctctctctctgtcacccaggcaggagtgcagtggtataatcagctcactgcagccttagccccctgggctcaagtaattctcccacttcagcctcccaggtagctaggactacaggcacacactaccacacctggctaattttattatttgtagagacagggtctcgctatggttttgttgtttgtttgtttgtttgtcattgcttttgttttgagacagagtctcgctgtgtcacccaggctggagtgcagtggtgtgatcttggctcactgcaacttctgcctcccaggttcaagggattctcctgcttcagcctcccaagtagctgggattacaggcacctgccaccacgcctggctcattttgcgtttttagtggagatggggtttcaccatgttggccaggctggtttcaaacttttgacctcaagtgatccacccacctcagcctcccaaagtgctgggattacaggcatgagccaccgtgcccagcctcattatttttactgtgtggcttgggcttcagtctcctcacctgtaagatgggacagtagcagcagtatgtactctgaggggctgagagaggggccgggctgaggcagagtgcctatgagccctgtccctctgtgtcccctgccacaggcctatgaacgctctgagagcttggaggtggccttcgttactcagctggtgaagaagttgcttattatcatctcacgccctgcgaggctgctggagtgcctggtgagggggctgggcatgggtaggggtgggttggtagaccctgggagcctgtggtgagcccactcctgccctgcctcaggaattcaaccccgaggagttctaccacctgctggaggcggccgaaggacacgccaaggagggccaccttgtgaagacggacatcccccgctacatcatccgccagctgggcctcacccgtgacccctttccaggtgccggctggtgggcgcagggggactgggggtgagcaggcccagaacccagctcgtgctcactctcagtccctccctagatgtggtgcatctggaggaacaggacagtggtggttccaacacccctgagcaagacgatctctctgaggtaaggctgggtggctaagcggtcagtaccctggttcctgggagggcagggtggggctcatctccggcttctttgccctcaggctttgtggatctcttggtcctacactctgagcctcagttttcccatccataaaatgggattaataatagctcttccagagcctggcatgctggctcatgcctgtaatcccagcactttgggaggccaaggtgggcagatcacctgaggtcgggagttcgagaccagcctaaccaacatggagaaaccccgtttctacttaaaaaaaaaaaaaatgcaaaaattagccaagcctggtggcacatgcctctaatcccagctacttgtgaggctgaggcagaagaatcacttgaatccaggaggcagagattgctgtgaactgagattacaccactgcactccagcctgggcaacaagagcgaaactgtctcaaaaaataaaataaaataaaataaaataattgctcttcccctgtgacctctttgtcatgttaaaatccatgaaacataaaatttaatttacttttttaaccattttattttatttttatttatttatttatttattttttgagatggagttttgctcttgttgcccaggctggagtgcaatggcactatctcagctcaccacaacctccatctcctgggttcaagcaattctcctgcctcagcctcccgagtagctgggattacaggcatgtaacaccacacccggctaattttgtatttttagtagagactaaaatttctccatgttggtcaggctggttgcaaactcccaatctcagttgatctgcccatctcggcctcccaaagtgctgggattacaggcatgagccaccgcgcccggcctttttaaccattttaaaatgaacaattcggggccgggtgcagtggcttaggcctgtaatcccagcactttgggaggccaaggcaggaggattgtttgtgctaaggcatttgagaccagcctgggcagcataaaaaatcagctgggcgtggtggtgcacccctgtagtcccagctactcgggaggctgaggtgggaggatcctatgagcccaggaagtcaaggcttcagtaagccatgatcacaccactgcactccagcctgggcaacagggtgagaccctgtcttgaaaaatgaaattaaaaataataaagaataggccaggtgcaatggcttatgcatgtaatcctagtactttgggaggccaagatgggtggatcacttgaggtcaggaattcgaaaccagcctggccaacatggtgaaaccccatttccactaaaaatacaaaaaaattagttgggcgtggtggcacatgcctgtaatcccagctacttggaaggctgaggcaggagaattgcttgaacccgggaggtggaggttggtgtgagccaagatcccaccactgcactccagcctgggcaacagagcgagactctgtctcaaaataataataataataataataataataataataataatgattaatagtaataaataaacaattctgcagcatttagtaattcaccatgctgtacagccattagatctatgtagttgcagaacttttttatcacccccaaagggaaacctcacacccattacacactccctcctcattcctccctccctgcagtccctggcaaccactaatctattttctctctctgtggaattgctttttctggatatttctttttttttttttttttgagacagaatttcactcttgttgcccaggctggagtgcaatggcgtgatctcggctcactgcaacctccgcctcccaggttcaagcaattctcctccctcagcctcctgagtagctgggattataggcatgcgccaccacacctggctaattttgtatttttagtaaagacagggtttcaccatgttggtcaggctggtctcgaactcctgacctcaggtgatctgcctgccttggcctcccaaagtgctgcgattacaggcgtgagccacatgcctggcctttttctggatatttcctataaatgggatcgtatgctctgtggcctcttatgactggcttatttcacttaacataacgtttctgaggtttatccatgttgtagcttgtgtcactgcttcattcatttttatagccgagtaatattccattgaatggtagatgcattcatccactggtgaacattgggttgtccatctttcatctgttgtaaatagtgctcttatgaatgtgggtgtacaaatatttggctggacaactgctttgagttatttaggatatacgtctagaggtggaatttcttggtcatatggtagctctatgtttaacttatagaggaatcctgcatgggctttcgagcaagctaactggctgtatgtgttaatggcagctcagcatggggaaaattgccaattctattcccaggccagccacactttggcagatgttccagatgtctagtggagagtcctaccccaatggccacacatgtgttttctctgaactgcctagtatttttcaaaaatttgggctgggcctgatggctcacggctgtaatcccagcactttgagagactgcggcgggtggatcacttgaggtcaggaagtcgagaccagcctggccaacatggtgaaaccctgtctctactaaaaaaatacataaaattagccaggtgtggtggtgcccacccgtaatcccagctacttgggaggctgaggcaggagaactgctggaaccagggagacaaagattgcagtgagccgatatcaaaccactgcactccagcctgggtgagagagtgagactccatcttgaaaaaaataaaaatagataaataaaagaagcaaaatataaaaattgaaagatttttgcttcaaaatctgggtttgggccttctcttgaaaaatcagaagttctagggctgggtgtagtggctcatgcctgtagtcccagcactttgggaagccaaggtggcaggattgcttgagcccaggagtttgaaaccagtctggacaacatagcaagaccctgtctctacttaaaaaaaaatagaagaagaagaagttctaataatactgtggtggaaccagctgagtgggggtggtcctgtgatattgggtacctgccccttcgtcatccatggcctccaccctggtctactggcccctgaagacgcttaagtttgtaatctttatttcaaattgtgtctatacagtcacacagatatatacacatacctttcctttatgtatatatttaaaaggaatctcacaatatatgccatttgtttaattttttgaataggtaatggaatgacatcactcaaaatctaaaactctaaaaaaaggtatttatctctcattgtttgtaggattctgttattccttttaatcaaacttgttaattgagtgattcaaatcttccatctccctattcatttatcttgcctgattaatctaatagtttctgagagaaatgtgaaaccttattttaagcaaattctccttgtaattctgtcaattttttttttttttttgccattttggtttttatttgattataggtaagagttccatacaatagtgtgcgaagtattgcaaacaataaaggaaaaatacagcataagatacctcttacactctgcccaattctgtcaatttttatgtcagatatttttaggctacattctttggagcatataagttcaatatttttatatatcatagatctttttatgtaatatctatgtaataaatctctttgtccctaagaaaaatcaaaataattttcaagaaagatatacagtgaaaaaaatcttactcctaccttttttccccattgccctatagccctgaaatatgattacatagttttattttgccacttttttttttttttttagacaaagttccactcttgttgcccaggctggagtgcaacagtgtgatctcggctcactgcaacctctgcttcctgggttcaagtggttctcctgcttcagccttccaagcagctgggattataggcaaccaccaccacgcctggctaagtttttgtatttttaatagagacagggtttcaccatgttggccaggctggtctcgaactcctgaccttcaggtgatccacttgccttggcctcccaaagtgctgggattgcaggtgtgagccaccacacctggcctttgccacatttttttgcacataaacgtacaatacatattgcctattgcatttttacacttaataaaatagaggactttctaaatccatagacagagagtttcctcattatttctaacagtggcacaatgtttctttatctaactaccccacatgtgtttgtttggctaatttaacgtatggattattatttccaatctcacaatgagcaagatagtagatataccatttttcacatgtgcaagtatatctgtagcataaattcaaaagtaaaattgctgagtcaaagggaacatgtatttgtaattctgatctgtatcaaacagtaatttacactcccaacagcaaagtatatatgttcacctacatatttgcccatagaggatatcaggttttggagttttttctcccaatctgctaggtgaaaaatggtattttgtggtagttataatttgcctttctgttattgtaagtgagattgagaattttttttttttgagatggagttttgctcttgttgcccaggctggagtgcaatgccacgatctcggctcaccacaacctctgcctcctgggttcaagcgattctcctgcctcagcctcctgagtagctgggattacaggcatgtgccatcatgcccagctgattttgtatttttagtatagatggggtttctccatgttggccaggcttgtctcgagctcctgacctcaggtgatccaccagcctcagcctcccaggtgatccgcccgccttggcctcccaaagtgctggggttacaagcgtaagccactgcacctggccaagaatcttttttttttttttgagacagagtctcgctctgtcacccaggctgaagtgcagtggcatgatctctgctcactgcaagctctgcctcccgggttcacgccattctcctgcctcagcctcccaagtagctgggactacatgtgcccgccaccatgcctggctaattgtttcgtattttcagtagagatggggtttcacagtgttagccaggatggtctcgatctcctgaccgcatgatccgcccaccttggccttccaaagtgctgtgattacaggcgtgagccaccgctccaggcccgaatcttttagtatgtttaagagctgtaactctggctgggtacagtggctcatgcctgtagtccctactctttgggaggccaaggcaggcagattgcttcagcctaggagttcaagagcagcctgggcaagatggcaaaaccaaaatactaaaattagcctggcatggtggcatgtgcctgtggtcccagctacctgggaggctgaggcaggagaatcacttgagccctagaggtggaggctgcagtgagcaccactacactccagtctgaatatcagagtgagaacctatctcaaaaaaaaaaaaaaaaaaaaaaaaaaaaaaagctctaactgtaatttacttacctcacccacttttttctcttcaattgttaggcttttgttattgatttttgggaactctttatatatttatatattaggatgactattttgttggtttcctgctatcttttctagtggaagaagatgagaatatgtcttcagagtcagtcttgggttcaagtcctaactttctctttcattatggcacttggatgaaggactctttcattctgtgcctcagtttccccatgtgtaaaatgaaattaaaagcatcctgctctcatgatgatgatggtggtgtggtctccatctttttcctgaagggccgcagcagcaaggccaagaaaccgccgggggagaatgacttcgataccatcaagctcataagcaacggtgcctacgggtgagccacccggggctctggcggggggagggtggcggaggccgggtgtctcggaggtgacggccggtcctcgctctctccccctgcagcgctgtctacctggtgcggcaccgcgacacgcggcagcgctttgccatgaaaaagatcaacaagcagaacttgatcctccgcaaccagatccagcaggcctttgtggagcgcgatatcctcaccttcgccgagaacccgtttgtggtcggcatgttctgctcctttgagactcggcgccacctctgcatggtcatggaatatgtggaaggtgtggctgcctgcggggctgcagggaagatggggccgtgctcactggtcagggctgcggggtggcctgcctgagccgcagtctccatattgattagtcggcctgtatgtttatccatctatttatttctccagtcattgatttgtccatccattctacctatatatttattcagtcatctattggtttatttgtttttcatttcattcagcataaaaacattcagtctgacccattatccatccatctatccttctatctactgatgtgctaatccatctgtttttccatccatacatccatgaacctgtttttatttatttatttatttattcatttattcatttatttattttttgagacagagtcttgctctgtcacccaggctgcagtgcagtggtgcaatctcggttcactgcaacctccgactcccaggctcaagcgattcttatgcctcagcctcccgagtagctgggattatgggcctgtgccaccattcatgggtaatttttctatttttagcagagacaggatttcgccatgtttgccaggctagtcttgaactcctgaccttaagtgatctgcctgcctgggcctcccaaagtgctgggattacaggcatgagccactgtgccaggcctattttattttatttatttatttttgagacaagatctcactctgttgctcaggctggaatgtagtggtgcgatcacagctcactgcagcctcaaatgcctgggctcaatcaattctcccacctcagcctcccaaatacctgggattataggtgcggaccaccacactcggctaatttttgggaggccaaggtggggagatcacaaggtcaggggttcaagaccagcctggccaacatggtgaaaccctgactctaccaaaaatacaaaaattagccagatggcacactcctataatcccagctactcacgtggctgaagtgggaggattgtttaaacacaggaagcagaggttgcagtaagccgagatcgtgctgctgcactccaggctaggctgagatcatgccattgcactccagccctggcaactgagcaagaccctgtcccgcaaaaaaaaaaaaaaaaaagttttttgttttttgtttttttttgttcgtttgttttgttttttatgcagtctccctgtattgcccaagttagtctccaactcctgggctcaagcaaccgtcctgcctcagccttccaaagtcctgggattacaggcacgagccaccgagcccatcccatatacctgtttattaatccacctttccatccatccctcacatcccgcaatttgtctttgtggttgtccatctgtttatccatccgtatgtctgtttaccattatacacctatttttcttttttttgggggggacggcgtcttgctctgtctcccaggctggagtgcagtggcgcaatctcagctcactgcaagctccacctcctaggttcacaccattctcctgcctcagcctcctgagtagctgggattacaggtgcccgccaccatgcccgactaattttttttgtatttttagtagagacggggtttcaccgtgttggccaggatggtctcgatctcttgacctcatgatccgcccacctcggcctcccaaagtgctgtgattacaggcgtgaaccaccacacccggcttatacacctatttttcctttttctttctttctttttttttttttttttgagacagagtcttgctctgtcaccaggctcgaatgcagtggcgctatctcggctcactgtaacctccaccttccaggttcaagtgattctcctgcctgagcctcccgagtagctgggattacaggtgtgtgccaccacacctggctaattttttgtatttttagtagaaatagggttttcaccatgttggccaggctggtctcgaactcctgacctcaggtgatcctcccacctcagcctcccaaagtgctgggattacaggcgtgagccatagcttgcggcccatatattgtttttaatccatccgtgcatgtattcacccaaatgttaatccatctattgtccaaaaccacacatgctgtggctattatgacacatacatgatccctggggcctcagctgtgcctcctccaagccttccagtcaaccatccagtcactcaacgaacacctcctcatcatctccctcgtgtcacatgctgtgctaggtgccagtgacacagaggagacccaggcacagacatctccccgccatggagattccattctggtctgtatagacagacaataaacaagcagagcaagccaaagagataaggacatttatttatttatttatttatggagtctcgctctttcacccaggctggagtgccgtggcgcaatcttggtgcacagcaacctccatctcccaggctcaaggattctcatgcctcagcctcctgagtagctgggactaaaggcgcgcctccaccatgcccagctgatttttgtatttttagtagagacaggggtttcaccaggttggccaggctggtcttgaactcctgacctcaggtgatcagcccaccttggcctcccaaagtgctgggattacaggcatgagccaccatgcccagccagggcatttcatagtgaggacatgaggtccatgaggctggaggaggtgatggggaggcaggcagggagcttctcagaggcctggattatgatggaataagtgacctgctagtacaaagtctcttaggtgacaatttagatttggaggagtggcaagcaggcccatggagccgaaggcaagtgagcaagggaggggagatgaggatgaaggggcgctgatgaggagggtattccagagactggaatggcattggatttcattctgaatgcaacagaaggtcactggagcattgttgtttttttctttttctttttctctctttctttctttctttctttctttctttctttcttttttgagatagagtctcgttctgttgcccaggctggagtgcagtggcgcatcctcggctcactgcaacctccgcctcccgggttcaagcgattctcctgcctcaacctcctgagtagctgggattacaggtgcccgccaccacgcccacctaatttctgtatttttagtagagatggggtttcatcatgttggtcaggctggtctcaaactccacacctcatgatctgtctgcctcggcctcccaaagtgctgggattacaggagtgagccaccgtgcctgcctttttttttttttttttttgaaatggagtctcactcacgctgtcacccaggctagagtgcaatggggtgatctcggattactgcagcctccgtctccaaggttcaagtgattctcctgcctcagtctcccgagtagctaggattacaggcgtgtgccaccacatctggcaaatttttgtacttttagtagagacggattttcaccatgttggccaggctggtctcgaattcctagccttaaatgatccatcagtctcggcctcccgaagtatggggattacaggcgtgaatcactgcgcccagccttgttttgttttatttttagtgcattgtccaggctggagtgcagtggtgtgatcacagcttactgcagccttgaactcctgggctcaagcaatcctcccacctcagcctccaaaagtagctgaaactacaggcaggcaccaccatgtccagctaatggagggttttaagaagatttgatatgatcagatttatgttttaagaaaatccatttggaggcccattatagtagcttacgactgtaatcccagcacttacagtgggagaccaaggcaggcagaacacttgtggtcaagagtccaagatcaacctacccagcatggtgaaaccctgttgttgttgtttttttcttttcctttttttttttttttttgagacagagtttcgctctggctaaactcgttgcccaggctagagtgcaatgacgtgatcttggctcaccgcaacctcctcctcccgggttcaagcgattctcctgcctcagcttcttgagtagctggaattataggtatgcaccaccacacctggctatttttgtatttttagtagagatggggtttctccatgtcagccaggctggtctcgaactcccaacctcaggtgatgtgcctgcctcggcttcccaaagtgttgggattacaggcgtgagccactgtgcccggccaatgaaaccctgtttctactaaaattacaaaaattagccaggagtggcggtgcacgcctatcatcccagctactcgggaggctgaggaacaagaatctcttgaacccgggggcggtgagtgggcagaggttgcagtgagccgagatggagccactgcactctagcctgggtgacagagccagactctgactcaaaaaaaaaaaaaaaaaaaaaaagagaaaaagaaaaaaattaagaaaagataatccatttggctcttgtggagagagcagaatcaggagactaggaggtagatgactgctctagtccaggttcattgcagaggaggaggagagaagggggccaaatcagtatctctatggtgggtctgtgtgcacaatagatgtgctcaaatgcagattcctgggccccaccctcagagagtttctgaaaccagcaaaatctcgcagaaaagagaacagaaaaaagaaagaaatcattagctttcttggtcattggtgattgaaaaaccaatattaccttcaggaatggctggatgtaggtgctcaaaccattccatcaggaaactctccatctcttggctctgtactcccacatgtgggcttccttctagacaagccctcatgtagcaaggttgccatctagcagatctcagcttacattctatgagcttagcaattcttacaggaaaagagtgaaaattccaagggctaactcactggagcaacttgggttacatactgccccggttgctgcacatggaaggaaatctagcctttgtaggataaaaaggaaatagatattgagaaactgaaataccaatgccaattacagtaaatctggcagaggggcagaggcagtggccaacactttgggaagctgaggcaggaggatcctttgaacccaagagttggagaccagcttgggcaacacaatgaaactcgtttctacaaaaaacttttttttttttttttttgagacggagtcttgctctgtcacccaggctggactgcagtggtgcgatcttggatctctgcaacctctgcctcccaggttcaagccattcttctgccttagcctcccgagtagctgggattacagccgtctgccaacaagccaggctaactttagtattcttttttcagagatggggtttcaccatgttgaccaggctggtctcgaactcctgacctcaagtgatccacccgccttggcttcccaaagtgctgggatttcaggcgtgagctaccatgcccagccttgaacaattttttaaaaatcagctgggcatggtggctcacatctgtagtcccagctactcaggaggctgaagcaggaggattgcttgagctgggaggttgaggatgcagtgagctgtgatcttgccaccgcactctagactgggcaatggagtaagaccctgtctcaaaaaaaaaaaaaaaaaatctagtgaagaccaagaatctgcatctaaggcttccagctccaaggttcagacaccaggagatagagggctgtgcttccagatgcagttgataagtgggtagcctttgttccccaactaaacctcacctctaccaacaactgcctgcatgacccatcctttctttgagtctccatccctttgtgtataagatgagctgatgacaccaactttggaggatggctaagaggacaagaagaacccagtagaggacctggagggagggaggcccctctcagagcctcagtttcccttatctataaaacgggtacaacataacatgagaagttggtgctatggtgcatgtccagagagaggaatgcctccctttttatgcgggcccatttcctggcctgcaggcggcgactgtgccaccctgctgaagaatattggagcgctgcccgtagagatggcccgcatgtactttgctgagacggtgctagccctggagtatttgcacaactatggcatcgtgcaccgcgacctcaagcctgacaagtgagctttgatctttcccatcactccctctgtccctcgggaggccaggaggcagaatggacgggcctcatccctgagatccccacctgtgcctacagcctccttatcacctccatgggtcacatcaagctcacagatttcggcctctccaagatggggctcatgagcctcaccaccaacttatatgaaggccacatcgagaaggacgcccgagagttcctggacaaacaggtgtgtgtgcgggcatgggggtcgctgagggtggagtgaccctgcaggacctcgggaacccagggcctggtggggggcacagctctcccttgagggccctcctctggctggggcgtgggctgacagcctgcccccaggtgtgtgggaccccagagtacatcgcgcccgaggtcatcctgcgtcaaggctacggcaagccagtggactggtgggctatggggatcatcctctacgagttcctggtgggctgtgtgcccttcttcggagacacaccagaggagctatttggacaggtcatcagtggtacgtggcttggcagtgtacaggggcagagtgtggtgtgcacggagagatggacaggctcagggttccagggatttcaaaagcgaccccccagaggatcgcttgcactcaggaggtcaaggctgcagtgagccatgatcgtgccactgcactccagctgggtgacacagtgagatcctgtgtccaaacaacaacaacaacaaaaaccgcccctaagttccgttttgttttgcagatgacatcctgtggcccgagggggatgaggccctacctacggaggcccaactcctcatatccagcctcctgcagaccaaccctctggtcaggcttggggcaggtaagtccgccatgcagaggagctgagggcccactgatagagagcaggcctccaaaaccccaggcccagcctgtgctgtggccccggggcggaagacatggggggcggggctgggctgctgggttggccatcagctgtggctggaatcccttccgtcccaggcggcgcttttgaggtgaagcagcacagtttctttcgagacctggactggacagggctgctgaggcagaaggccgagttcatcccccacctagagtcggaagatgacactagctactttgacagtgagctgggacaccaggcacgacctgggtcgaggggtgggatccgggaagagggaccctggggtaagtaaagcctgggatagggcctggctaagtaccaagatgtgatgcctaggtgcgaaggtggtattttggtgggggcggggccaagtggggcggggctgacatacaggcggggctcaggctgaaatgtaggtaagaacctgagattgggctaggtgtggggcctggcctgggtgagttgtgagtgtgggcctggaactgaactagagagaggtactagcgctcagaatggcctggggtgatgccagggtgcagagcactgtaggtggagcgtggcctctttggaggcggggctagacggtgccactgagaatggggcaaggaccttgcctgggagcggagcctaaattaaatacactaatgaggcaggggcgtggcctgacctgaagacttgtaaacccgtcttgaaccaggactgggctcctgtggggatgtgatatgaggaggaaccccgtaccctcagtcacagcccatacccgctccccagcccgctcagacaggtatcaccacgtgaactcctatgacgaggatgacacgacggaggaggagcccgtggaaatccgccagttctcttcctgctctccgcgcttcagcaaggtgggccaagtctgggtgtgggacagggcgagaccccaggagggatggggcttggagagacagtgagaaacaggttccctggtgcccaaggtctcaggagcgggaagttattgatggggcgggagtctggaaggtggtaaggccacgcaagaggcaggttcgggagtctatgggacgggcctttggcactgagtggaatctaacaggaatcaggacagttgtgcagattgaggccatggtggggcggggctaggtgtgggtggggcggggtcaggacgtgggaatgaggccagcagcgaaggcggagtaaagcccagcgaagtcttgcttttatttatttatttttattttttctaataacgggcagagaagccataggccttgctttgagaagcaacttgtagaggcgtgcagggcctagcctgggctaaggagacataaattaagggggttgctgggaagatggggctgtgtagagagcagattggtcagggcatcgtcggggcagagcctagaataaaacgcagtgcctaactttgtggtgtggggcctgaactgaagaattgtaggttgggggatcatgcacaattgggcggagccaggcctcggagggtggagtgcgttttgcgggggatccactgccaggaagctgattagctccggagtgaaagtggaacccgggctggacttgcctcccaccaccacctacaggtgtatagcagcatggagcagctgtcgcagcacgagcccaagaccccagtagcagctgcagggagcagcaagcgggagccgagcaccaagggccccgaggagaaggtggccggcaagcgggaggggctgggcggcctgaccctgcgtgagaagacctggagagggggctctccggagatgtgagcaggggaatggcggagtttgggggcggggtcgaagggggcgtgtcttccataaccacgccccctccatgcagcaagcgattctccgcgtccgaggccagtttcctggagggagaggccagtccccctttgggcgcccgccgccgtttctcggcgctgctggagcccagccgcttcagcgccccccaagaggacgaggatgaggcccggctgcgcaggcctccccggcccagctccgaccccgcgggatccctggatgcacgggcccccaaagaggagactcaaggggaaggcacctccagcgccggggactccgaggccagtgagtgccctatcgtgctgccttccccaatcttccccaatgtcctactggtcatatagtgagcatcccacgagcctggtgctgtttatgaaagatctcaggtcctattcacattgcaatttgggatttttttttttttttttttttttgagacagagtctcactccatcacccaggatggagtgcagtggcgtgatctcggctcactgcaacctccacctcccaagttcaagtggttctcgcacctcagcctcccgagtagctgggattacaggcgcgcgccactacccccggctaatttttgtatttttagtagagacagggtttcttcatgttggcaaggctggtctcgaactcctgacctcaagtgatctgccttccttggcctaccaaagtgctggggttacagtcgtgagccaccacacccagcccaatttgggattcttaacattagaaacaccccaataccatggtcagtcagtgatacagaccgatacagactatgtctctatatgaggagcagtgaggcatgcaggttacctgctcagatgaaactcaccatccatcaagggtaaaaagtggaaagagcattccaggcagggaaacagtatgtgggaaatccctggccttggactaattcctaacacacttgctttctgttgcagctgaccgtccacgcccaggtgacctctgcccaccctcgaaggatggggatgcatcaggcccaagggctaccaatgacttggttctgcgccgggcgcggcaccagcagatgtcaggggatgtggcagtagagaagaggccttctcgaactgggggcaaagtcatcaaatcagcctcagccactgccttatctgtcatgattcctgcaggtaatgctgggccccacctggcaggggaggggctgccccccatttgaggcaggacagaccaatgaaaatgctgcattttccctgtccaccgtgattggctccaggctggaccaatgagaggctgctctgccactgccttgggaggagggaggagcagatacagggagatgtctatcttcttggttctgatttctgaccatggttgtgtgtctgtagtggacccacatggaagttcaccccttgctagtcccatgtctccacgatctctgtcctccaacccatcctcacgggactcctcacccagccgggactactcaccagctgtcagtgggctccgctcccccatcaccatccagcgctcgggcaagaagtatggcttcacactgcgtgccatccgtgtctacatgggtgacacggatgtctatagtgtccaccacattgtctgggtgagtactcatgggtggagtctccatcacagagtggagggtggtggggaaaaggcccctccagctcaaaccagttagcctgggtgagacacctctgtgaccctctatgcctcttccctctctaaacctgtttcttttttcttttacttttttattttaggcggagactcactgtgtcgccaggccggagtgcagtggcaggatctcggctcactgcaacctctgcctcctgagttcaagccattctcctgcctcaaccttctgagtagctgggactacagacaggcgcgcgccaccacgcccagctaatttttgtatttttagtagagacggggtttcaccatgttggctaggatggtctcaatctcttgacctcgtgattcacccacctcggcctctcaaactgctgggattacaggcgtgagccacggtgcctggccgagactgtttcttcatctgcaaaatggggagaataggccaggcgcagtggctcaggcctgtaatcccagcactttgggaggctgaggtgggcagatcactggaggtcaggagtttgagactagcctggccaatatggtgaaaccctgtctctattaaaaatacaaaaattgggccgagcgcggtggctgtaatcccggcactttgggaggccgaggagggtggatcatgaggtcaggagatcgagaccatcctggctaacatggtgaaaccccctctctactaaaaatacaaaaaattagctgggcatggtggtgggcgcctgtagtcccagctacttgggaggctgaggcaggagaatcgcttgaacccgggaggcggagcttgcagtgagccgagattgcgccactgcactttagcctgggcgacagagcaagacaccatctcaaaaaaaaaaaaaaaaaaaaaaaaaatggccaggcgcggtggctcacgcctgtaatcccggcactttgggaggccgaggtgggtggatcacgaggttaggagtttgagatcagcctgaccaacatggtgaaaccccatctctactaaaaatacaaaaaaaattagccaggcgtggtggcagatgcctgtaatcccagctactcaggaggctgagacaggataatcgcgtgaacccgggaggcggagcttgcagtgagccgacatcgcgccactgcactccagcctgggtgacagagcgagagactccgtctcaaaaaaaaaaaaaaaaaaaattagccggaggtagtggcgcatgcctataatcccagctacttgggaggctgagggaggagaatcgcttgaacctgggaggcgggtgttgttgcagtgagccaggattgcgccacagcactccagcctgggtgacagagtgagactccgtccaaaaaaaaaaaaaaaatgtggggggaggaataataactatttcacaaggtgttatgaggattctaatgcatgcagagctaagtgtcctgcatataagtttaggagctttccttgttaccaatcccactaaccctgtccctatggggtgctcttttcccagcatgtggaggaaggaggcccagcccaggaggcaggactctgtgctggggacctcatcacccacgtgaatggggagcctgtgcatggcatggtgcatcctgaggtcgtggagctgatccttaaggtgagtgcagggaaggaggcaccctgggcggagggtgggggaggcctgagcagcccctagcagagcattttcccgcattcttcccccagagtggcaacaaggtagcagtgaccacaacgcccttcgaaaatacctctatccgcattggtcccgcaaggcgcagcagctacaaggctaaaatggctcggaggaacaagcgaccctccgccaaggagggccaggagaggtgggcacagccgtaaacagcctggtctttgagcagtgggtggaacttaggcgggaggggcacagatgaggatggagaagggaagagcacgggaaaggtggcgggaacaaatgaccaacaagcaaagggaagaggacaattaagaggggctgcgggctgggcgcggtggctcacgcctgtaaccccagcactttgggaggccgaggcgggcagatcacgaggtcaggagtttgagaccagcctggccaatatggtgaaaccccatctctactaaaaatacaaaaattagcctggcatggtggcgctcgcctgcagtcccagctacttaggaagctgaggcagaagaatcccttgaacccgggaggtggatgttgcagtgagccaagattgtgccactgcactccaacctgggcaacagagtgagactccatctcaaacaaacaaacaaacaaacaaacaaaaaaagaggggctgggatgagtcacacctgtaatcacagcactttgggaggctgaggcagaaggatcacttgagcccaggagtcaagattaggggcaacatagagagaccccatctctacaaaaaacttaaaaaactagttgggtttggtggcacacacctgtggtctcagctactcggaggctgaagtgggaggattgcttgagcctgggaggtcgaggctgcagtgagctatgatctcaccactgcagtccagctgtgacaacagagctagactctttcaaaaaaaaaaaaaaaaaaaaaaaagaggggctgtaaaagtggaaggagccaagaatggaagctgtgccaaatttctaggatcagagaaaagcattgtaggagggtcttgcacatataggcaggcccaggagatgtgaactggaaagggagatgtccagagacggagggggtccaggagatggtcctatcctgttagatgtgtttagacagaactgggaaaggctagaataagaaatgtctatctggaatgagcatgccaggcaaggttcagccaactgaaatcctattttcccttatagataggaggagctaggtgggaggtgggtggggccagaagggtattctgtttgtttgtttgtttttagtattctgttttgatcagtgagtttggcccagacaagtacagggatttgggtgagaggagccagacggggttgagataagtacatttcttcccactcttataggtgggttgtagtggaagaggcgggactagaggcaggtgggaccaagttggttttgtttggatgtgtttctagcctggactgggagtggccaaaaggttgggcaggacctgaagtgggaggagggaggagccaagcagcactgagttaagggaagttctgtcttgataggtgggttgtagtgaaagacggagggactagaggggtgggcaggactagaagaggttgtttttggccgggcgaggtggttcacacctgtaatcccagcactttgggaggccgaggtgggtggatcacctgaggtcaggagtttgagaccagcctgaccaacatggtgaaaccccatctctactaaaaatacaaaaattagctgggagtggtggctcactcctgtagtcccacctactcaggaggctactcacgaagctgaagcacggtaatcgcttgaacccgggaggtagaggttgcagtgagccgagatcgtgccattgcactccagcctgggcgacaagagcgaaacttcgtctcaaaaaaaaaaaaaaaaatggttttgtttggatgagtgtttgtagccagaattgggagtggcctaaagttgggcggggcctgaagtaggaggagctaaaggaagttctatcttgataggtggattgtagtggaagagggaggagctagagaggtgggcggggcagaacaggttggttttgtttggatgcttgtttctagcttggactaggagtggccaaagggggtgggtggggactgaagtgggaggagccaagcagcactgagctaaaggaagttctttatcttgataggtgggttgtagctggagagggaagggccagaaggggtgggtggttaccgttgtgaggccgtgaaatgggaggagccctgagctctggcgtccaggtcaaggacgcttggccccctccctgtcccgcagcaagaagcgcagctccctcttccggaagatcacgaagcagtcgaacctgctgcatactagccgctcgctgtcgtcgctgaaccgctcgctgtcatccagcgatagtctcccgggctcgcctacgcacgggctgccggcgcgctcgcccacgcacagctaccgctccacgcctgactccgcctacctaggtattacctcctgcacctgcgcggggaccgagcagcgcggggtggcctggctggtgcttgggctgtactcactcgcttcacctcctgtctcccgcaggcgcctcatcccagagcagctccccagcctcgagcacgcccaactcgcctgcgtcgtcggcgtcgcaccacattcggcccagcacgctgcacggactgtcgccaaagctccatcgccagtaccgctctgcgcgatgcaagtcggccggcaacatccctctatcgccgctggcacacacgccgtcccccacgcaggcgtcaccgccgccactgccgggccacacggtgggcagctcgcacactactcagagcttcccggccaaactgcactcatcgcctcccgtcgtgcgcccgcgccccaagagtgccgagccccctcgctcgccgctcctcaagcgcgtgcagtcggccgagaagctgggagcctctttgagtgcggacaagaagggcgcgctgcgcaaacacagcctcgaggtgggccacccggatttccgcaaggacttccatggcgagctggcgctgcatagccttgccgagtccgacggtgagacgcccccagtcgagggccttggcgcgccccggcaggtcgccgtccgccgcctgggccgacaggagtcacctttgagcctgggcgcggacccgttgctgcccgagggtgcctccaggccaccagtgtcgagcaaggagaaggaatccccggggggcgccgaggcgtgcaccccaccccgcgcgacgacccccggtggccggaccctggagcgggacgtcggctgcacgcggcatcagagcgtgcagacggaggatggcactggcgggatggccagggctgtggccaaggcggcgctgagcccggtgcaggaacacgagacaggccggcgcagcagctctggcgaggcgggcacacccctggtacccattgtcgtagagcctgcgcggcccggggctaaggctgtggtgcctcagcctctgggcgcggactccaaggggttgcaggaacccgcacccctggcgccttccgtgcccgaggccccccggggccgggagcgctgggtgttggaggtggtggaggagcgcaccacgctgagcggtcctcgctccaagcccgcctccccaaagctctccccggagccccagacaccctccctagccccagcgaagtgcagtgcacccagcagtgcagtgaccccagtcccacccgcatccctcttgggctcaggcaccaagcctcaagtggggctgacctcccggtgccctgctgaagctgtgcccccagcaggcctgaccaaaaaaggagtgtccagtcccgcacccccgggaccatagccaagggggtcatcggccccgcgctgtacagcctccgtatacatatgtacacatataaataaagtgcgtccgtgctgcgtgagttttctggggctcactcctctccaggcaaggcgagacatcacacgaccccacccccatgcccaggtgctttttgggaggtgggactccagttctggttaccatggagagtggagggaattttggatagacacctcctgtggtcccacttctggtctcacctctgcaccaactgcccccaaacctttagggggagaattgaagctgcgatgctcttgtgtcccagcgcccacctgaagagaaggttaacagcctcgtccaccaatttccatttatttactcctcaacaatcctgatggcaggtattatgtttcccattttgcagacaggtagactgtgtcacagagcggttaaggcacacaatcaaggtcatacagctaggaaggggatgaactgggattcaaaatcaagtccaaactggttcctgagcccttagattttttattttttatttttttgacacagagtctcattctgtcacccaggctgaagtgccgtggtgttagctcagctcatgacaacctctgcctcccgagttcaagcgattctcctgcctcagcctcccgaggagctaggaccacagacgcgtgccaccatgtctggctaatttttaaatatttttaatggatatggggtttcaccatgttggccaggctggtctcgaactcctgacctcaagtgatctgcccatctcagcctcccaaagtgctggggttacagatgtgagccactgcacccacccgtcccccgccccccctttttttttgaaacagagtcttgctatgtgacccaggttggcgtaatcatagttcactgtgaccatgatctccctggttcaatcgatcctctggcttcagtggctgggactacaggcatttatcaccgtgcctggctaactttttttaagttctagtagagatgtggtctcactatgtagcccaggctggtctcgaattcctgagttcaagtgatcctccctccttggcttcccaaagtgctgggattacatacgtgagccactgcacctggccataagggttagatcttataagctctgctgggcttcctggccatgccattacagggctggtagttcttcaccagcggctggaaggctttccagagggctggcagctgggcacacagtgtgcccccaccccgttgctcctctccctggttccgattcatgtcacccacgcaggtccagggcccttttggggacacgcaccatttggagtggtcctctgtgctgttgaagcttgggccggctggtccagggaaagctatctggttcacattcagaacctgccagatatccgagcagttagagggcaggatgcctacagttttgtgccagaactggacctgcaggttggtaccaagggctgctgccaaccagccggagtacaggtctgcaaaggatggagagagggcacaggtagggtcagggccactgcgagggagtccctagtccacttcccctctctcagctcagtttccatatttccttttttttttttttttttgacatggagtcttgctctgtcgcccaggctagagtgcattggtgcaatctaggctcattgcaacctctgcctccgaggttcaagtgattctcctgcctcagccttctgagtagctgggactacaggcatgcacaaccatacccggctaattttttaataaagaggggtttcaccatattgaccaggctggtctcaaactcctgatctcaagcaatccgcccacctcggtcttccaaaatgctgggactacaggtgtgtgtcaccgcgccctgccacagtttccatatttctgagctcagttgtcaattcccagtcctgggaatgatgacattaatattaattgcccttcccaaatttgtttttgagacagagtctcactctgtcgcccaggctggagtgcagtggtgtaatctcggcacactgcaacctctgcctcctggtttcaagcgattctcatgcctcagcctcctgagtagctgggattacaggtgcccgccaccacacccggctaatttttgtacttttagtagagatggggttccaccatgttggccaggctgttctcaaactcctgaccgtgtaatcagccagcgccctccaccatgcccagataatttttgtacttttagtagagatggagtttcaccatgttggccagactggtcttgaactcctgggctcaagtgacccacccgccttggtctcccaaaatgtggggattacaggtgagccaccgcgtccggccctgagtgtttttaattaattaacttatttattttgagactgggtctcattttgacaccccagctggagtgcagtggcaggatcatgactcacttgcagcctcgacctcctgggctcaagctgttctcccacctcagcctcctgagtagtggggactacacgtgtgtgccactatgccccactaattaaaattttttttgtagagatggggtcccgctgtgttgcccaggctggtctcaaactcctgggctcaagcaatcctcctgcctcgactgggattacaggtgtgagccactgtgcctggcctatttatttgtatttatttatttatttatttattttgagacacagtctcactctgtcacccaggctggagtgcagtggcactatcttgactcactgcaagctccaccttccgggttcacgccattctcctgcctcagcctcccgagtaactgggactacaggtgcccgccaccatgcctggctaatttttgcacttttagtagagacagggtttcaccgtgttagccaggatggtctcgatctcctgagctcgtgatctgcccacctcagcctcccaaagtgctgggattacaggcatgagccactgtgcccagcctatttatttatttttaaataaagacagggtcttgctctgtcacccaggctggagtgcagtggagtcattatagctcactgcagtctgaaactctgggctcaatttatcctcctgcctcagcctcccaagttgcttggctaatttttaattttgtagagatgaggtcttgctatgtttcccaggcttgtcttggatgcctgtcttcaaatgatcctcctgcctcagcctcctaagtaactgggattacaggagtgaggcaccacctctggcacccaaatgacttacaggtaccacttcattcacaattttttaagtagatgtcagtatccccatttttcagatgagtagaccaaggctcaggtgaagttatacatcacacagcaaaacccagggtttgaacccaggtctgttcactgatcatgtgattatagctcccaaacagacctggtctctaccgctgacttgaactcagccatggccacaccagtcaccctgtctgcagagaaggagctctccaaccctcaaccttgagactcaccatctccaaatttgctgaacttggcaaagctctggaaaacagccccggcctgggatgtgagtgtgatgctgctgttccagggttcttggctaacgtggtggcccttgaccacattctccaagtcggggaattcctgggcaaagatcccttccagctggtagttatagacccaggggtaggtgtaggtcagctgcttgcctggaggacaaggggaggaggaaatgcaagatcgttccaggttctggtcagtaaacccaggactcatcctgtgtccctgactcgacttacccatcttcgagaactgagcgaagggaaaagacacacagagcagggtctgcccgtaggtacaggcgctatgaggccagctgtatgcagcagaggaggccggtggagggaagttaggtacactgtggaccagccagaagcccccatcgtggtcaaggagcaggacacctggaccaaaagaaggcattaggggaggtcgggcgcagtggctcacgcctgtaatcccagcactttgggagaccgagacacacagatcacctgaggtcaggagttagaaatcagcctggccaacatggcgaaaccccatctctactaaaaatacaaaaattagctgagcgtggtggtggacgcctgtaatcccagctactcaggaggctgaggcaggagaatcgcttgaacccaggaggtggaggttgcagtgagctgagatccaccactgcactccagcctgggccacagagcaaaatttcatctcaaacataagtaagtaagtaagtaaataaataaataaataaataaataaataaaaatttaaaaaaagaaggcaggccccacgcagtgtaatcccagcactttgggaagccgaggagggcggatcacctgaggtcgggagttcaagaccagcctggccaacatggagaaacctcatcactactaaaaatacaacattagccgggcatggtggtgcatgcctgtaatcccagctactcgggaggctgatgcaggagaatcacttgaacccaggaggcggaggttgcagtgagccgagattgcaccattgcactccagcctgggtagcaagagcaaaactccttctcaaaaaaaaaaaaaaaaaaaaggcaattagagggtattgctccaggcctcccagcaagctcatctgcaatcaggaacaccctcagtttgcagcggggcttagagagggtgccagcagtgttagaaccacagctgagctcagtttttgcaggcataaattcttatagtccagaataacgccaagagtaatgtaaggtagggaaacaggccaggtgtggcggctcatgccggtaatcgcagcacattaagaggccaaggtgggtggattgcttgaaccaggacttagagaccagcctaggcaacatggcaaaagcccactctacaaaaatacaaaaagtaggccaggtgtggtggctcacgcctgtaatcccagcactttgggaggccaaggcaggtggatcacctgaggtcaggagttcaatatcagcctgtccaacctggtaaaaccccatctctactaaaacatacaacatttagctgggcatggtggcgcacacctgtaatcccagctactccagaggctgaggcagaagaatcgcttgaactggggagatggagattgcagtgagctgagattgcaccaccgaactccagcctgggtgatggagagagagtgccgcaaaaaaaaaaaaaaaaaaaaaaagccaggcgtggtggggggtaccggcaggcccagtacttgggaggctgaggtaggaggatcacctgagccctgggaggtcaaggctgcagtgagctgtgatactgcactccagcctaggtgactgggtgagaccttgtctaaaagaaaataaaataggggaaatagatgcccaaggtctgacaggggagatctcccaccccactatggaggtcaggggttagcttggaaaaatgcataggaactcggctgggcagggtggctcattcctgtaatcccagcactttgggaggccaaggcgggtagatcacttgaggtagaaaccaggagttcgagaccagcctggccaacatggtgaaacctcgtctgtactaaaaatatgaaaattagcctggtgtgatggtgcgcctttaataccagctacttgggaggctgagacaggagaattgcttcaaccccagaggcagagattgcagtgagccaagattgtgccactgcactccagcttgggtgacagagcgaactcccaccgtctcaaaaacaaagaaaaaaaaaagttggggggaatagatgcccagggtctgacagtgcagatctccccgaccaccccatgcacgtcaggggttaccttggaaaaatgggacccgagtctctccccagcccccaatccaggcctcacccttcgtgtgcccacgcatggaagagtcctgagccttgctgggttgaggcggttggtcattgtagagcaggaaggcgagctgcgggcggataaacggaggcaacgtgaaattcctcccaggcagggcagccctagagtttcgcccctagttggcccggggcccccttcacctggctggtgttgctccggtacagcggctgcaggcttcggcccacggccccctccgggctgttgatgagtgccctgccgtcccgccagcctccggagctctcgtccagatacttgtactgcagccctctctgcgccgcctccccggaccctctaagagctggcagcttgtagaccacgaacctggaggtcggagaatgcacagaaataggagagagggaagagaaggcaccccagggttccccgaggaggtagccatcccggttgagtgaccgcagccggaccccggggcgatggtaggccccccgctgcgcactcaccagtctacaggctgcccggagtccccgtagcaggtcagggccccggcggggacgcacagcagcgctgccagcagcagcgggatcatagctgctatggggctgagatccaggaatctgtgtcgggactgcggggcgctgggttacatcagaggccaggactggcacctggcgcctttcacttccctaaacttgcctgggaaccggggcggggacatcacgagggtacagactcctcccccgagacgcgatgctgcgttttggagaggcaaaaggcaacgctgagtctgcccagaccacgcccacgacgggcccggcgctccagcgtctcctggagcctggccaccgttccttttcgtggtagctaatcccagcccacgctcttctgtctgacccaactcccgcccgggtttctggatcaggcacaagtttgtattttattttttattccagccctacaacctgggtccaactcttgggacctttgttcttcctctttttttttttttttttttttttttttttttgagacggagtttcactcttgtcgcccaggctggagtgcaatggcacgatctcggttcactgcaacctccgccttcctgattaaagcgattatcctgcctcagcctcccgagtagctgggattacaggcgcccgacaccacgcccggctaatttttgtagttttagtagagacggggtttttccatgttgactaggctggtctcgaactcctgacctcgtgatccaccagcctcggcccccgaaagtgccaagattgcagaagtgagccactgcgccccttaagaagcatttgtgttccagtgtatcttcccctttttctttctttttttttttccttccttttttttttttttttttcccggacaatatctcgctctgttgcccaggccggagtgcagtggcgcaatcttggctcactgcaacctctgcctccccagctcaagtgatcctctcacctcagcctcccgagtagctgggatcacgggcacatgccactatgcccagctaatttttgtagttttttttttgaaacacggtttcaccatgtggctcaggctgaactcctgagctcaagggatccacctgtcttgcctcccaaagtgctgggattacaggcatgtaatccacgccacccagactctcctttttcattctgcacgttttctccaggatcccctgagctagcaaagaggtgactgtatgtttgttttttgtcgttttgagacaggataatggtttctcacccaggctagaatgcagtgactccatcacagttcactgcagcctcaacctactgggctcaagagatcttcccaggtagctggtactacaggcctgtgccaccacacccagataattgttcattgcagagatgagggtctcactatgttgcccaggctgctctggaactccggggttcaagtgattctcccacctcagcctcaaaggatcatggcagggcaaagggctatgggaatctgagtactggcttgaaactgcctttgcaaaaattatgacagaaaattatgtcagtgaaagagctctgacctaaccaactccatcttgcctttaatctccaaactgcccttgcttggtcattcctggagtggggtcaagctaactttttttttttttttgacacgttgtctcactctgtcgcccaggctggagtccagtggtgtgatctcagctcactgcaacatccgcctcctaggttcaagcaatcctcctgcctcagcttcctgagtagctgggattacaggcatgcgccacatgcccagctaatttttgtatttttggtagagactgggtttcaccatttttggtagagatggggtttcaccttggggctcaggctggtgtcgaactcctgggctcaagtgatctgcccgcctcagcctgccaaattgctgggattaaagagggagccaccatgcctggccccaagctaattttgggaggaatttagtttatagcttaaatgataatagcccttccccaaactaaactgcctttgtagaaataatgaaagggcactaggttaggaggatgagaggagcctgaattctgctaaactgtaggtgtagtagttaaattatgaccagccatttttccggccgggtgcggtgcctcacgcctgtaatcccagcactttgagaggccgaggctggcagattacctgaggtcaggatttcgaaaccagcctggccagcatttcgaaaccccatctcttctaaaaatacaaaaattagcccggcatggtggcatgtgcctgtaatcctagctacctggtaggctgacacaggagaatcacttgaacccaggaggcagaggttgcagtgagccaagatggaacaactgcactccagcctgggcaagagcaagactccatctcaaaaacaaaaacaaagatggccagccattattctggaggtcacaaggtttgcaacttccccagttatttctgcaaataacatgactattgcaaaacctaacgctggcctttttagatgtctttttaggctttttgcatatctgacaactggatgactccacccagactagcgactctatggtccccacccagaagctgactcagcaactgttttccacagctccaggattgcagcaaggcacccattccctagccctcctgcccaccaaactgttcttgaataaccctagcctctgaattttcagggaggctgattcaagtaataaaactcccatctcccatttagctggatgtatgtggattaaactctctctattgcaatccctctgtctcgataaattggctctatctggacagtgggcaagatgaaccccctgggcagtcataggctgtgaactcttaaatccagggagatgtttgctgtcaatgtccgcagggttcaaggcagaagacaaggacagtgtagcctgaactgggtgggaaaagagaggacagcaaggcctccagtgcccaagggggcttgttggagttgaggggtgtcactgtagtttaggagatgagggtgtgtaaggccctctaatatgacctctaggtttacagcctcctgccatcttccagcctccaaaacccaaaaattcaggccaacgctgaagctttatctgggaggggcatttttataggacccataaccattgacagttaatatcagccacaataagggaccttcaggagccgctttctagacccagggtctctgggaagcctcatcccacaccctctcctgctgtccagggccatctgggagctggtctgagtgtccactgagtccgtttatttggcggtctgtctcactgggtttgcacgacagtttggacatctctgtgtggctccctgtggctgaaggcttgtcggattttccgtaagaggctcccccagggctgtctatgggtccgtgtttgatatttgggtggatctttgggaacgcgagtccaggagagggtccattcgtgggaaaaccacccagcattgtgtcacgcgcgtccgtgtgaagagaccaccaaacaggcttcttgtcccatccccagtcactaggagagtccaagtgccagggcagggctcaaaggtggcgcttcatgtgcaaggccaggtggtcagagcgcgaaaaagcacgtgggcagagctggcagcggaaggggcgctgccccgtgtgtttccggtagtggcgggtcagctcgtccgagcgcgcgaatctccagccgcagccttcccacgtgcaggcgtatggcttctcccctaggggacaaggaagccataagcgccactgtctgcccagtcatgtccccgggtcccctgcatctggccacacccctttactcagcctgggctgggactaggatgaacaaagtgaggcccctagggcacaaaatttaaggaggcactcactctcagaggccagccaagtccaagtcccgccctctgcaacccttcttcccctgtaactacagcgggcgccgcgccctttctcatgtccggggccccgccccctcacctgtgtgcgtgcgcagatgcgccttcaggtgggagctcttggtgtagctcttgccgcaacccgggtgcgcgcacgtgtgcgctgcctgcctcttgcgcgcccacgaacgtcggcctcgcttggatggcgcggtctcggctatcacacctggatcctctgcagtccccccgagtccagtgcccaccgtcccgggtcccaaacaactcaggaaggagggggacgtggcgggaccgggcgcgggtccctggagcccgcggaagagctggaagtgcccttggtactgaggcgccgggtacatcgcggggtacccggacagtagcccgtagggggcgcccgacgccgcaggcactgaaagcccggtccgcgggaagtagccacccgaggagccggcgccgggccccgggtacaccggttgcagcgccagcgccttgggctcgggggccggggctggagccagggctgggcccacgaaggcgtcgggagcccgggctcgcagggcagggcgcacccaacccgagtgatcctccgaacccaaaagcccagccaccagccccgggccgccagcatatgcgcccagagtctcgggcggcggcggatattgcgccccggaggcctcgctgggcgccagagcgcaggtctggggcgcgccaccgggctccgggcccgagaagttggtgaggaggagatccaggtcccaggtggcgtccgcgcccctctcatcgtcctcttcctccccgggctggtcctcagacttcacgtggaggggcggctccgtggggtcaggaggacccgggcccatgtcctgcgcctcttcggagcgccaccactgcgggagggagcaggcagctcgaggttcggtggacactggggtgccctgcccagggacatcgcgggctggacactctgacgcagaggctttggaaaggggtcttgtttgcctgtctgtctgtcccacttccccaacactgcccctctaaccgcccctctccccgctccccccccagctccagggacagaaaccgatcaggtctggctggagacaggagataagacttccactatctggaaccacactcggggatgggggaaggggtagcagagctgctggagatggaaaactggcaggggacgggggagaggatgccagccttgacttagttttcccccagaacatccctctccttccctgtctcccaaaacaagattaattccgaaattttggatgtcccccagacacactcatcatttcccgctgatatctggaagattgtctgtgagcctagatctcgttcctttttttttttttttttcttgagatagggtcttactcttttgcccaggctggagtgcagtggtgcagctcactgtatccttaatctcctgggctctaatgatcctcctgcatcagcctacggagtacctgggactacaggcacacgcccccatgcctggcctaatgtttttggtattttttgtagagatagggtttcaccatgttgcccaggctaccttcgttttctattaccgaaatagatcacacttagaacctcaaacccctagaccaccctcctcaccccctgccagactaagctgagatctcctctcctggactgagcgtacctcagtcctggttaagtctcttgatttcaggtcaagatgcaggtctggaccccaagatctgtgactgtggccctggattccagccagcccacctagaccccaccttctaggccccaccttgaggaagtcatcctgtgtgtccgggaaggggcccagggcggtcagtgtgctgatggagggcaaggcggtctcggctgtggccatggctggctggtgcccaccctgggcctcaagcctcctcttcctcggctgcctcgtgaactctgaggctgtgatagccccttcgagggctcctctctgtccttagctgattggctgcagcctctgataaggcaaagcaaggcaaggcggcgggggggcactgtttctggggcacaaacttcacgttggcctgtctggggctggggttaaagactaaccctgtgtccaaagccaagtcaaatatcaagggttggggggttcagggtttgagggtccaggtgctgggtaaaaacagacattgggtctccaaagaaggagagacttgggggtcttccctcagttaactttcctggaaaaggcagaaagggtattctgggaagaagctgtgggaccccctgtccccctgattgaggctccacagccctccccctccccagtaaacagcaacaaccgtgctgatggcgggacttggcacgagctccccgccaagcattatcagacaccccagacgttggaggctgctatcaggtgggggcccaggccagctagagctctgtcctccggtgaaggggagggctgggagttgggtcttcaaattagcctggcgttcaatttgcctgggttgggacctcccagggtctcagccctgcagcaggaggaagcccctgacaactggcccaccattgtctactggggacccttgggtggcactgcatgggactgcatggaggctggttcagtgccagctgctttagtgcgatgggggcagccaagggaaaagtgaccctctctcctcctgggtgggataggaccgttggatcaagccacaggcagtacctgacctgcaggagaccagtgccctggctctgggcctggctgctccttgattctgcccaacatgaggagaggatctgagtttctacaacaggaacctccactctggtgccctgggagcctgggaaggggacatggatacgtattacagacacataactcatagtcactcattggaagactgaggcaggaggatcacttgacaccaggatttcaagaccagcctgggcaacataaaacctatctctccaacaaaaagctgtgagtggtggtgcatgcccatagtcccagctactcaggaggctgaggtgggaggattgcctgagcccaggaggtcgggactgcactgaactataatcacaccactgcagtccagcctggggcacagaaagcaagactctgtcgctggaaaaaaaaaaaagttgggtggccatctttattcctggcagatcaacctgggtgacacaaacaaaaacaaggccaggtgcggtggttcacacctgtaaccccagcactttgggaagccaaggtggggagatcacttgaggtcaggagttcgagaccagactggccaacaggatgaagccctctctctgctaaaaatacaaaaattagctgggcattgtggcacatgcttgtaatcccagctatttgggaggctgagctggagaactggttgaaacttggaggcatggggccaggcgcagtagctcacgctagtaatcccagcactttgggaggccgaggcaggcagatcacctgaggccaggagttcgagacaaacctggccaacacagtgaaaccctgtctactaaaaatataaaaataggccggggatggtggcatacacctctaatcccaggtacccgggaggctgaggcacaagaatcacttgagcctgggaggcagaggttgcagtgagccaagatcatgccactgcactccagcctgggctacagagtgagattctgtctctaaaaaacaaaaacaaaacaggcttggagcagtgagtagtggctcatgcctgcagtcccagcactttgggaggccaaggtaggaggaatgctcgagcccaggagttcaagaccagcttgggcaacatagcgagatcccatctctaaaaacaaaaacaaaaacacagttactcacaggaccatgcaattacataatgacatgagttcctgttccctcagtcacactgatcatataatccgtgcacatataattgtgtgtctgtctatgtatatggactatgcacagacatacaattcccaggcactaaaacacaaccctatgctatattggttacacaatgtcatagccaaacaatctctaaaacacagaattcataatccacaggcaggcacacagttatacaatcctactgacacaatttagccgtaattgagcagacacacatggggagtcagatacattgtcacagaactttttttttttagatagtgtctctctctgtcacccaggctggagtgcagtggcatgattttggctcactgcaacctccacctcctaggctcaagtgattcctctgcctcagcctcccaagtagctgggattacaggtgcctgctaccacgccacgctaattttttttttttttttttttttgagacagagtttcactcttgttgcccaggctggagtgcaatggcatgatctcagctcactgcaacctctgcctcctgggttcaagtgattctcctgcctcagcctcccgagttgctgggattacaggcacccacaagcaggcctggctaatttttgtatttttagtagagatggggtttccccatgttggccaggctggtcctgacctcaggtgacccaccctccttggcctcccaaagtgctgggatgacaggcatgagccgccccagccagtcaaaacctacactttatacagtcacaccaccggtcacttttacaatatgtaaagtaattatttagtcacagttgcatagctaccagtgcccaaccgtaggggatgcacccagttaaacacagacaaacgcaaggacatggcatcacaggtcctgagaatcaagacacacacatttctcaacagatacacaatcagaatgggtgcaccacaaatgcactacacaaaaagacaaaacaggcggggcgcggtggctcacgcctgtaatcccagcactttgggaggccgaggtgggtggatcacttgaggtcaggagtttgaggccagcctggccaacatggtgaaacccgtctctattaaatataagaaaaaaggccaggcatggtggctcacacctgtaatcccagctactcaggaggctgaggcaggagaattgcttgaatccagtaggcagaggttgcagtgagccaagattgcgctactgcactccagcctgggcaacagagtgagaatccgtctcaaaaaaaaaaaaaaaaaaaaaaaattagccaggcatgatggcatgcttcagtggtcccagctacttggaggctgaggtgggaggatcgcccaggaggtggaagctgcagtgagctatgatcgcgccactgcactccagcctgagcgacagaacgagaccctgtctaaaaagaaaaaacaaaaacaaaacaaaacaaccacatagactcacagaatcacacaagttcacacacacacacacatacacagacacagacacacacacacacacacacacacacacacagagtcacaagtatctacatgtgcttcctgggacagactggcagaaaggtttgctaagatcgcccacttggagctcgtcttccccacaaccagcacccaattagagaactcgagtctggcctcctgggttcaggaggacgcctagtgctcgcgccagaatttctttgtttaattcttgactccctccgcacacaccccctgcaactgaccaaccaggagtgggccgagccctttcctacggccaataagaggagaaacccagctggccaatcggtttcccgcactcgtcttccgcccctaccccgtccgcttcttaaaggggctagcctatctctgtctgggccccccgatttccacaggcaaggctaccttagcccttttaaaaggcagagctgcggagggggccggattctaggaggaaccaatgaaaagcctcactcggcctccgctcctcccacttcttgctgaggtcaaaggcctgcgtcagttgcactgtagcctcggcagtgaaccgggaggtactaccaggtaaggaaggtgcggtagccccagccgtgggtgagaggagctccgctctgacacccccgctcctgtaggtcgccgtcgttgctccgctcgctctgagagagcatggccctgagaggcgtctccgtgcggctgctgagccgcggacccggcctgcacgtccttcgcacgtgggtctcgtcggcggcgcagaccggtcagtgtggggtcgggagtgtggagggaaggagggaggaactgggggtttagggactttccggggtgactttcccgttctgtgcttgcagagaaaggcgggagaacacagagccaactggctaagtgtaaggacctctggtcgcaccgtgtgtctgctgcccctgttcagctgtctgtctgccgcaggtggactctgtcccagaatccgagagctgcccgagcggggtggcagggtcgtggccagggtcagaggcactaaggcagtgagtgcgctgtgcctgcggggccggagaaaagtcacctgatcagtctcgcttgcagctcgcactagccggggggcgacatgggtgttggggggtagggctgatgagggtccgagaagggagggcacagtgatcttgcggactggaccgaggcgaattccccttcccagcctcgcgtcccgagtttgactggcaggacccgctggtgctggaggagcagctgaccacagatgagatcctcatcagggacaccttccgcacctactgccaggagagactcatgcctcgcatcctgttggccaatcgcaacgaaggtgggcgggctggtgggtgccctgagactgctcctccgcctggagccatagccaccccacctcaaggcccctctgtccttggggctggggcttcctgtggcctaggcctgggcctgaatttgggcactggtccctttgcagtttttcatcgggagatcatttcggagatgggggagttgggtgtgctgggccccaccatcaaaggtaggaacaagtatctctccacacactgcagaaccctctgtattctgaaagcctcttcctccttccctccctccctttcttccttccttctctttcttttcttttccttttctttcctttcttcttcccccccaacagagtctggctctgttgcccaggctggagtgcagtggcacgatcttggctcactgcaaattctgcctcccaggctcaagcgattctcctgcctccacccctctagtagctgggattacaggtatgtgccaccatgcctggctaatttttgtatttttagtagagacagggtttcactgtgttggccaggctggtctcaaactcctgacctcaggtgatccgcccacctcagcctcctaaagtgctgggattacaggcatgagccaccacgttcagccttctttttgagatggagtttcgctcttgttgtccaggctggagtgcagtgatgcaatcttggctcactgcagcctccacctcccgggtttaagtgattatcctgcctcaggctcccgagtagctgggattacaggcgtccgccaccacgcctggctaatttttgtatttttagtagaggtggggtttcaccgtgttggccaggctagtctcgaactcctgacctcaggtgatccacccgcctcagcctcctgattacaggtgtgagccaccgttgcccggcccttttcttttttttttttttttgagatggagtttcgctctgtcacccagcctggattactggattacagtggtgcgatcctggctcactgcagtttcctcctcctaggttcaagcaattctgccacctcagccttctgagtagctgggattacaggggtgcaccaccacgcccagctaatttttgtattttttagtagaaatgggatttcaccatgttggccaggctggtcttgaactcctgacctcaggtgatccacccacctcggcctcccaaagtgctgggattataaacgtgagccaccgtgcctggcccctttgtttctttttttagagacagggtctcactgtgttgcccaggctgttctcaagtgatcctcttgccttactgaaagcccccttctttccctaagccacaatttcccagtctgtaaagtggggctgttgtcccaccctctgaaagtggctgtggagatgaaatgaataaacctcagctagggccagcttggtgcctgcctccttgtgtgtccttattcagccctgtctcttgggtcttagctgggcagggccctgttctctattgtcctgctttcccctcctactaccaccaggatatggctgtgctggggtttcgtctgtggcctatgggctcctggcccgagagctggagcgggtggacagtggctacaggtcggcgatgagtgtccagtcctccctcgtcatgcaccctatctatgcctatggcagcgaggaacagcggcagaagtacctgccccagctgggtgagtggctgcccatggggcctggtggaaggaagacagtctctgaggtctggaactcaagggtggggctgtcccctgagcctattctgtccctatctcaaagatagcataagtggccacctggacccccgccagaccctgggcttcacctggagatctgatccctggccagcctgactgtccccctctgtgaccaccgtcatctccctatgctttctgtgttccccagtccagcccaaagtttaaagtccaccaggttcctgctggccatttgcagtggctcacacctataatcccagcactttgggagggtgaagtgagaagatcccttgagcccaagagttcgaaaccagcctgggcaacgtaaggagaccccatgtctattagaaaaacaaaaaaaggaaagagcctatgtgacctgcgctaagtggacgttggccctcttccgtggtgtctcggaggtgttcagctgcttcaagatgaagctgaacatctccttcccagccactggctgccagaaactcattgaagtggacgatgaacgcaaactttgtactttttatgagaagcgtatggccacagaagttgctgttgacgctctgggtgaagaatggaagggttacgtggtcggaatcagtggtgggaacaataaacaaggtttccccttgaaacagggtgtcttgacccatggccgtgtccacttgctactgagtaaggggcattcctattacagaccaaggagaactggagaaagaaagagaagatcagttcatggttgcatcgtggatgccaatctgagtgttctcaacttggttattgtaaaaaaaaggagagaagggtattcctggactgactgagactatgatgcctcgtcacctggggcccagtacagctagcagaatccgtaaacttttcagtctctctaaagaaaatgatgtctgccagtatgttgtaaaaaagcccttaaacaaagaaggtaagaaacctaggaccaaagcacccaagattcagcgccttgtcactccacatgtcctgcagcacaaacagcggcgtattgctctgaagcagccgcatattaagaaaaataaagaagaggctgcagaatatgctaaacttttggccaagagaatgaaggaggctaagaagcaccagggacaaatcgtgaagagacgcagactgtcctctctgcgagcttccacttctaagtctgaatccagtcagaaataagattttttgagtaacaaataagatcagattcgcaaaaaaaaaaaaaaacccacaaggccctgtgtgaccaggcctctgctgacctttccacctcatctctggccactcatgtgatcctcccagccagacttagctacttgaaattctccagaagtaccaccagttctttacacatctgttccctctcccagcactgctcttccccacagcctcctcctgcttaactcctcacacccttccagtttggccaactccttcctgattccctgggtccccctccccatcttggcattgtgatcatgactttggggtaacctgtctcttgaaagcagggccagatctaacttagttatgaggtctgactcaggggcgagggtaattttttttttctttttttgagacaaagtcccgctccgtcccccaggctgaagtgcagtggtacaatcttggctcactgcaacctgcggttccccagttcaagcaattcctgtgcctcggcctcccaattagctgggattgcaggtgcttgctacccgtgcctggctaatttttgtatttttagtagagatggtgtttcactatgttggccaggctggtctcgaactccagacctcaagtgatccatctgccttggcctcccaaagtgctgagattacatgtgtgagccacctcgactggcctaattttttgtatttttagtagagatggggtttcaccatattggtcaggctggattttttttcttttttgagatggagtcttgctctgttgcccaggctgtagtgcagtggcatgatcttggctcactgcaacctctcctgcccgggttcaagcgattctcctgcctcagtctcctgagtagctgggattacaggcacccaccaccacatctggctatttttttttttttttttttttaagtagagatggggtttcaccatgttggccaggctggtctggaactcctgacctcaattgatccacctgccttggcctcctaaagtgctgggatgacaggcgtgagccactgcaccccgccacgaggataatttttgagtaaggggatgtatcagggaccaggcagccttgtgactttgtcttgtgcctgcagccaagggggagctcctgggctgcttcgggctcacagagcccaacagcggaagtgaccccagcagcatggagaccagagcccactacaactcatccaacaagagctacaccctcaatgggaccaagacctggtaagggttctgggtggtgggcaggtggtgaacaggggcaaaggggcactggtcagacccctcaccgactgttccatccccaggatcacgaactcgcctatggccgatctgtttgtagtgtgggctcggtgtgaagatggctgcattcggggcttcctgctggagaaggggatgcggggtctctcggcccccaggatccagggcaagttctcgctgcgggcctcagccacaggcatgatcatcatggacggtgtggaggtgccagaggagaatgtgctccctggtgcatccagcctgggggtaagtggcagccactttgggaatgggtgttgggtcacctgcggatgcggctttgtcaggcaggctccgtgctggggacgcggctccctgtgcctgtggagcccacacagtggtgattcttactcagccggactcgctgacgtgctgaaaactgcccccatttggtgaccgtctcgctcatcccggctctgcccgggacacatgggcctgaaccagctcagtcatttgactcacagtgcatcttctggcatccgtcagcctcctggctctgagcatcgaacccagatgccaggctgggtgggactgtgtgcaaaccgagtgagcaggcaccgagcttcagtgccagggccatctgtgatgtgaaccacaacctgagtccccctgcgtggggtggctggggaggaggctttccctgcttcagagttggttctgcataggccctcttggtgtctcttgggtgggcctgaggcgccatctcaaccctacagggtcccttcggctgcctgaacaacgcccggtacggcatcgcgtggggcgtgcttggagcttcggagttctgcttgcacacagcccggcagtacgccctcgacaggtgtgtgagggctgcagtgagattctctgggggtgtggggcagcttgggtttcactctctataccatgggtgactccccagcccccacccaccaggcctgagttccttgctctggaatgaccagtgacgtccttctgagcagctgtgggctgagtcaacggcagggccagggcaagcttgggggcactgaggcagcctgggaaggcgtcctggagcagggggccccaggacagggacggggtgggagagtgggcctcccctcgctcttaccctgccattgcccatgtaggatgcagtttggtgtcccactggccaggaaccagctgattcagaagaagctggcagacatgctcactgagattaccctgggccttcacgcctgcctgcagctcggccgcttgaaggaccaggacaagtaggggctgtgtggtgggggcggggggatggcagcggtggctggaggaccttgtgtccttcctggagagaaaggtccttcctgcctggtggccctggggacctgaaccttctgctgtccctcttgtccttgatgggctgggctgaggacagccccactggtccctcattgggagcttggctgcatcagggaatccccaccccgggctaggtttgcttggagcatcgggatgccaggatccccagtccttgttaccctcatgtgccactcccagggctgcccccgagatggtttctctgctgaagaggaataactgtgggaaagccctggacatcgcccgccaggcccgagacatgctgggggggaatgggatttctgacgagtatcacgtgatccggcacgccatgaacctggaggccgtgaacacctacgaaggtaggagctggacctcagagggctcactgaggcctcagtgtctggggagggggtacagggaggtgggacggggacaggtctgagtccaactccacctatcactaagtgacagtgtgacctggggcgagccttacccctctgtccctcatctggagttactcacatggggactgtggaagtgaagtgcttcatgcagcacacagaggccccatcaggccttgcgaggggctcccagctctttctcccacatgctcgggaggagggatgttcctgagacaggtaagctccgaaggcagcccaggggtgaggcccgactcctagcaggctggtggacgcaagggagtgagcgaagctacacgcaggaatcaacgctccattttgttaagagacaaaagtcatcttcagatgacggtgtttgcaccctgtaactgatggtgatttacatgggggtccagaaccccttgcttggtgggaagacagatgtggaaaaagatacttaaaaaaaaaaaaaaagtgcaaacccagcatgcgctatgtagaaatagagggaggtatgaggaccccccgggcagagatgcttccagacagagagaacagcaaatgcaggaggggtgccttccctgcgcaccttgcaaccccagatcttgtctctatctggcatctggggggtggggggatcctacaaatgtgagaatgaccctgaggacaagcagcgggcgccatgagatggttttatgcagagaagggatgagtcagatttggtgctttaggggctcggcgcagtggctcacacctgtaatcccagcgctttgggaggctaaggcaggaggattgcttgagcccaggagttagaagttatgatgagctatgatcaccccactgcactccagcctgggtgacagagtgagaccctatctatatttaaaaaaaataggtttgtactttaggaagtaaacagaattggctctaaaaaggaggctacaatctgccttctgcttcaaggagctggggaggagcaaaggatgagacaccagggcatggggtgtgggattctctgggagaggcggcttcagatgggcagaggtcagctgaggcaagtgactgctcttccgatgtgctgtccctcctatccctcccgagggtaagaaagggcttgctgtgtttccttggagctcaggggtgctttcagcctctgtggcaaggaagcgtggccaggttgaaaatcaaacatttaataaactgtggggctgggggtggggagaacttgccaagggtggggagcacgaagcctgggcctatggcaggggctggacttgctacattttgggagttcagcacaaggagctttgggtttttgtttttttctgccaagatgcattatagaaccatgaaaaacaatttctcagtgtggcccaaatggtggcctcacagtcttctcctggagactgtcactaaggcgtgagtctcccggcagctgtcagcattcaccatctctgttggtctgtacttctgaagcagtggcctggggatacatgaaaattgattttaaagggaagttgtgagctatgaaaactccaaaccgactctgtattaatcttgtccaggtacacatgacattcacgccctgatccttgggagagctatcacgggaatccaggcgttcacggccagcaagtgagccgctccatcaggggcccgaaactctcaagcccctttctggagagatgcctggctggaccgtaggagcgctgtgctctgagcttagaaagggaggtggcggatggagtgggaagtgagagacactgatttttaaatatcaaaatttcccttctgaagtcgttcagatgtgttccttaaaaagaagatggaattctctgtagagcgtctcaatccacttttaaccatggatgagagcagactccatttaccctgaaatagcagcttctcttgagaggagagtgacatggaagcaactccgtctgctgcagctgaccccctcacactgagttcacagtgcgccctccctccctcccatctgggggtagtgccttatgctgggtgttggagcagagtgagggagaggaaaataaagacctgcacatctgaccccaaggtgtcaggccggtttactggtaaccacctgagaagtagtttcagccacagaagaaacgaacacgtctgggggctgtgagttgccgggacgtggtggggactttcccctagagtggtctggcccccatctgagtcttaggctctgctgtaaaaaagaaacccaggttagcagtgccggtctgtgccagggctgtgggcagaggggatgatttctgagtggcaggggtgcaagggactttgtcctttctgtcaccacagagctgctcatacaacagtgggacatgacaacggtttggcttctcagctcagacacaccatgttataggggatcacaaacaagatggtgagtgcaccaagggctttgcagggactgtggcctggcggggtcagggctgggtgcctggtttctgttcacatttactcttggctgggccatccctgtcctcttcctcaggcagcgccccccctgtgagtttactcatacctcaggctggagacacaggtctttgtacacagtctccacgctgtggcagacttgtttgagctctgtctccaaatggctgatctttgccattttctgggtgaactcttggagcttttcctggatgatcttgttgtggtcattataaatctgatagatcctctcctctaatttctctgtcagatccgaaacctgttaaacaataagatgtgttctcggaaaatcaaacaagaggtatcacaagacatctgtgttaagtgggtttcttagatttctgcaatttatcttatgaaaatgacaaaataggctgggcacggtggctcatgcctgtaaccccagcactttggtaggccaaggtgggtggattacttgaggccaggagttcaagaccaacctggccaacatggtgaaaacccatctctattaaaaatataaaagctaggacgggtgtggtggctcacgcctgtaatcctaacactttgggaggccgaggcgggcggatcacgaggtcaggagatcgagaccactgtgaaaccccgtctctactaaaaatacaaaaaaatttagccgggcgaggtggcgggcgcctgtagtcccagctacttgggaggctgaggcaggagaatggcgtgaacccgggcggcggagcttgcagtgagctgagatcgcgccactgcactccagcctgggctacagagcaagactccatctcaaaataaataaataaataaataaataaataaataaataaatacacaaatacataaaaactaactgggcatggtggtgtgcacctgtaatcccagctactcgggaggctgagacaggagaattgcttgaacctgggaggtggaggttgcagtgaaccaagatgatgccattgcactctaacctgggcaacaagagcaaaactccgtctcaaaaaaaaaaaaattagcaaggcataggtgacgcgcacttgcagtcccagctactcggaaggctgaggcaggaggatcacttgagcccaggagttggaggctacagtgagtcatgatcacactactgcactccagcctgagagaccctacctcaaaagaagaaaagaaaaacaccaaaaactaaaacccagtgcagtgactgggggtcagattgcctatattttaaatttttttgctttttttgttttgttttcttgcggcggagtttcgctctcattgcccaagctggagttcaatggcatgatcttggctcactgcaacctccgcctcctgggttcaagcgattctcctgcctcagcctcccgagtagctgggattacaggcgagcgccaccacacccagctaactttttgtatttttagtagaaacggggtttcaccatgttagccaggctggtctccaactcctgacctcaggagatccccaccttcagcctcccaaagtgctgggattacaggcatgagccactgcacctggcctgttaaatttttttaagaggcaaaagtatatacagtcgtgtgctgcataatgacattttggtcaatgtcagactgtatatacaatgatggcccataagagtataatgccatatttttactgtaccttttctatgtttatatatatttagatacacaaatacttaccatcatgttataagtgcctacagtattcagtatggtaacatgctgtgtgcaggtttgtagcttaggagcaataggctcttccacgtagcctaggtgtgtagtagactataccatctaggtttgtgtaaattcaatctatgatgttcagatgatgacagtgtcacctagggatgcatgtcacaaaactgtacagtacaagctcagccaggttaggaagaaagtacacagaatagaagaggcatccaacaaagtggcctctgggtgctgtatcaaaataaataaataaataaataaatgtttttgtatcttttctactagaggccaaggcagcagggtgaggagttcaagaccagcctgggtaacatagcaagatcccatctctacaaaaaaaatgtttaaagaaaattagctgggcatggtggtgcacacctgtagtctcagctacttaagaggcagaggtgggaggatcatttgagcccaggagtttgaggctccagtgagctgtgatcgtgccactgctctgtaagcctgggcaacagagtgagacgccacctctaaaaatataaataaataaataaaacaagtgagccgggcatgatgttgcatgcctatagtctcaagctactcgagaggctgaggtgagaagattgcttgagcccaggagttcaagattgcagtgacctatgattccaccactgcactgcagtctgggcaacagcaaggcttgtctcaaaaaaaaagaaaaaggaaaataaagtcaatctgtcatcaagacacctagaaccagcaagctgtcccactcatgtgacccattatgtattttgtttgtttgtttgtttgctggaattataggcacgtgctaccatgcctggctaatttttttttttttttcgagacagccaagatcgtgccactctactccagcctgggctgggcaacagagcgagactctgtctcaaaaaaaaaaaaaaaagaaaaagaaaaaaccagaaagaggcagtcttctttttcttctttttttttttttttgagatgaagtcttgctctgtcacccaggctggaatgcagtggcgggatctctgctcactgcaagctccgcctcccgggttcaggccattctcctgcctcagcctcctgagtagctgggactacaggcgcccgccaccacgcccagctaattttttgtatttttagtagagacagggtttcatcatgttaaccaggatggtcttgatctcctgacctcgtgatctgcccgcctcggcctcccaaagtgctgggattacaggcctgagccaccacgcccggccctcttctttttttttttttgagacggagtctcacctgtcaccaggctggagtgcagtggtgcaatctcggctcactgcaacctccgcctcccaggttcaagcaattctgtctcatcctcccgagtagctgggactacaggcgcgcaccaccatgcccagctaatttttgtatttttcatagagacggggtttcaccatgttggccaggatggtctccatctcctgaccttgtgatccccctgcctcagcctcccaaagtgctgggattataggcgtgagccaccacacctggcccctatttatttatttttgagacgaaatcttgctctctagcccaggctgcagtgccgtgcagagccactgcactgagccaatttttttatttttagtagagacgtggtttcaccatgttggccaggctggtctcgaactcctggcctcaagtgatccacctgcctcggccttccaaagtgctgggattacaggcgtgagccactgtgcctggtccccccattatatattctgaagaggcatcaggtgcaaccattcatgtaggacctgaacatcacaccagcttttgcaagatgtaagccctgggcatgtggaagaagctccactcccccgtcacagaccattcgatggcttctgcaggacatatgggtgtgacaatgcaagttgtgcctcaaccccctactcccgtggctgctcgaccttgcgtgaagtaagagggctgcgtgttggaggcaggagggcatccaacgccccgctccctcagcctggctctctcgtcaggcaaatcattcatttccaagccttatctatatcatgggtccaatctcttctctgtaggactattctaagggtaaattgagatacagatggtcccaacttactacagttcaacttactacatttttgacttacagcattttcaactcacaatgggtttattgggacgtagccccatcataagtggaggagctcctgtgctgtgtgtgaatggcctagcaccgtgcctggtgtacaacagacaccatcagtggttcattccctccccttttgcataaggaatcccccctctcgctgggtggagtctgtcaccttggtcttcaggctgttcctgaagttggtcatgagtgcatggtccttttgccggctcttgttgatgttttcgatcagctcctgggctctcttctgcaggatgtcaatgcttgagtccagagaggagaagtagagtcccgacttcccttccaggaccgtcagctggcaactggcactggaggtggcgacacaagggcaagaaacctgacttctcagagtacaggaagcggccaggtgtagtcgctcatgcctgtaatctcagcactttgtaggccgaggtgggcggatcacaaggtcaggagttcgagaccagcctggcaacatggtgaaacctcgtctctagtaaaaacaaaaaaacaaaaaattagccaggcacggtggcacgtgcctgtagtcccagctacttgggaggctgaggcaggagaattgcttgaacccaggggatgaagttgcagtgagccgagatcacgccactgtactccagcctgggtgacagagcgagactccgtctaaaaaaaaaaaaaggacaggatgctgagatcagcaccagactcttccaagagcggctgatctgagagagatcaggtgggaggggacccgcgttgttgccttccatgggtgacacgaggcatgcttcctaggttattccattcacacacacgccctgaatgatgagaatggcacccccattttatagctgagaaaacagaccaagaggcacgactaaatatgcccaaggttccagaccaaggaggtctgtctgtccccaaagcccactgttattttatgacaccaacttgcttctttggaattttggaataccaataatagtgtcaatgctttctttcttttttttttgagacggagtctcactctgtcgcccaggctggagtgcagtggcgcgatctcggctcactgcaagctccacctcccgggttcatgccattctcctggctcagcctcctgagtagctgggactacaggcgcccgccaccacgtccagctaattttttgtatttttagtagagacggggtttcaccgtgttagccaggatggtctccatctcctgacctcgtgatccgcccgcctcagcctcccaaactgctgggattacaggcgtgagccaccgcgcccagcccaatgctttctttcttattttctttttttttatagagacaggtctttctctgttgcccaggctggagtgcagtggcacaatcatagctcactgcagtgtcagcttcaagtgatcctcccacctcagcctcctgaataggtgggactacaagcatgtgctaccatgcacagctaatttttaaaatttttaaatagagactgggcttcactatgttattcaggctgctctcaaacttctggcctcccaaaatgttgggattacaggcatgagccactgcgcctgactgatgcaatcagcaatctcctgcaacctctgtctcctaggttcaagccattcttctgcctcagcctcccgagtagctggaattacaggtgcacaccactacacccaggtaatttttgtgtttttagtagagacagggtttcaccatattggccaggctggtctcgaactcctgacaagtgatcctcctgcctcggcctccaaaagtgctgggattacaggcgtgagccactgcgcccagcctgatgctttcttaagtgaccttcctgtcattaacctgctgcatccctttcccaacctactgggtgatgttgaccgcctggggctacagtgtacctgcacctccttgctcccaccaggtgaggtgaatacctgttgaattatatttaaagagcatttaaagaaatgcgcacacacaaaaagttgttggtcccatgttgtacatgtaactgtaattatgtaattcaaatattgtgttaacaagtgaaatagtggcagaagagtgacagctatctaaaaagctaaacagaatgaaaaattttgagtaatatgtaatgttccgtaacttcataatattcaatgtaataaaatggaacttcagttgggtatgggagagagaactaaaattgaagcaaagatcataaaaatctagaaaaattctgcatatagattgctctgccaaggccttgttctctgctttaaaaacagaactggggccgggcgcggtggctcaagcctgtaatcccagtactttgggaggccgaggtgggtggatcacaagggcaggagttcgagaccagcctggccaacatggtgaaaccccatctctactaaaaacacaaaaaattagccaggcgcagtggcaggcgcctgtaatcccagctactcaggaggctgaggtacaagaatcgcttgaactcgggagccgagatcacaccactgcactctagcccgggcaacagagtaagacttcgtctcaaaaataaataaattaattaaattaaattaaaataaattaaaacaactgaaaattgtgggtaatgcattgtgaatgaagtttatggaaaaaatgtgatctgataaggcaacccattggtattttaaattaagatatattttttcttcttctgatgctctggtttatttgaccggtttgacgtctgatcagttagcggttctggccaggtagagctgcccctgtgagtcacagctaacttttcctcagccatgttcccggcactgagctaagtcacatgccttgtcttggtgcatcctcacgaccacactcgggtcatctgctgttctctttacgacatgggcttagagtggttacaccaccttctcaaggtggaggacagtctgtggcagagctgggctttgtacccagaaggcctgacttcccagctggtatcctgcttcctactaaggcactcaggcgccactcccctcctggatcttacatttcctcgtcgccctctgaggtcctccagctctgaaaggccaagccttgtaggtgtggacagagcagttcctgaatgcagcaggtcacacttgtgtccacaagcaggttactgattacttacaaaaataaatcttggccaggcacagtggctcacgcctgtaatcccagcattttgggaggccgaggcgggtagatcaccagagatcaggagttcgagatcagcctggccaacatggtgaaaccccgtctctactaaaaatacaaaaattacccaggcatggtggcatgtgtctgtaatcccagctactaggcggactgaggcaggaggatcgcttgaacctgggaggcagaggttgcagtgagctgagatcgtgccactgcactccagcctgggcaacagagcgagactccatctcaaaaatataaaataaaataaaaataaatctcagctatctcaaccaggcacagtgggctcacgcctgtaataccagcacttcggggggctaaggcaggtgaatcgtgagctcagggttttgagaccagcctgggcaacatggcaaaaccccatctctacaaaaaacacaaaaattagccgagtgtggtggtgtgtacttgtagtcccagctacttaggaggctgaggtgagaggatcacttgagcccgggaggtcaaggctgcagtaagcttgatcatgccactgcactggagcctagatgatatcacgccactgtactccagcctgggcgacagagtgagaccctgtttcaaacaaacaaacaaaacaaccacaacacacatatacacccctcccctctccacccggtctcccccagccggccacctccctctttcctccccatcaaggccaaggttctagaaggagctgcttaaattttctgggctttttttttttttttttttttaagagagagagagagtctcaccctgggcttcttttcttttcttttgagacagagtctcgctctgtcaccgaggctggagtgcactggcatgatctcagctcactgcaagctctgcctcccgggttcacgccattctctttcctcagcctcccgagtagctgggactacaggcgcccgccaccacgcccggctaattttttgtatttttagtagagacagggtttcaccgtgttagccaggatggtttccatctcgtgacctcatgatctgcccacctcagcctctcaaagtgctgggattacaggcgtgagccaccgcgcccggccatcctgggcttattttcttacccccattcacttttcagtccattgtaatcaggttcctcccccggttctcaaatgaaacagctcctaccacagtcaccatgaccttgtggttagaccgatagacatctcagagtgacatgctgacctcttggcagcagccagcactgctgaccacccttccctgctactcccgacatgtggtatcccagaggtctgtgcttgggcctctgctgtcttcttgccagacaccgtcaatcacacacttgttctgcagtgaggcctccatgcctcctccctgctggcccctgcagctaatatcccagccaccattccacaatgcacaggctattattctccaaaggcattcattcccgtagcatgggatccctgaacagtcccctttcccacctacgtcctgtctcctccagaaagtgttccttggctggattaggtgcacacagcacctacggtttcactgtttacaccttggcctcccactgtagtctgctgaagggccagggccatccttcatctttgtatcttcagtacttacccctcatgagagaagcaataaatgtgctgctaataagtaaatgacttgcgagtactatccattaccatccacactttggattctatcatctaaattctatcatcccagcccatgcctctctcctgaggacccaagaatatatgaaacctcccagcctccccacatggctgtctcaaaggcatctgaaactccacatttgcacaaccaaaagcgtcatctcccaggcaacccgatttcatcttccattcccttagttaatgacataaaaagccacctggttcccaagctcaaaacttagcagcaagcctagagtccagcttctctctgtccctctgcatcctgtctcaaaatcccctcatttctaccttctttgtttttttatttttatttttaattaatttttttttcagatggagtttcactcttattgcccaggctggagtgcaatggcgcgatctcggctcactgcaacctccgcctcccgggttcaagcgattctcttgcctcagcctcccgaatagctgggattacaggcatgtaccaccacacttggcgaattttgtatttttagtagagacggagtttctccatgttggtcaggctggtctcaaactcccgacctcaggtgatccgccctcctcggcctctcaaagtgctgggattacaggcatgaaccactgtgcccagcctttttatttatttgtttttgagacagagtcttgctttgttgcccaagctagagtgcagtggagcgatctcaggtcactgcaacctccaactcccggtttcaagcgattctcttgcctcggcctcccaagtagctgggattacaggcacctgccaccacacccagctaatttttgtatttttagtagagacggggtttcaacatcttggccaggctggtctccaactcctgacctcgtgatctacctgcctcagcctcccaaagtgctgggattacaggcgtgagccaccatgcccggccctaccttcttaatgtctctaaatctaccatcattagcagctctataactttcacttctcaactaggccatagggacctttattttatttacttatttatttttgtaaaaaattttgtaataaattttatgttaaaaaatttttttttcttttgtaagaaattttcttttgtaaaaaattttgttattattattttgtttttgagacagactctcactcggtcgctcaggctggagtgacaggctggagtgtcgctcaggctggagtggtgcaatctcagctcactgccacctccacctcctgggctcgagtcattctcgtgccccagcctcctgagtagctgggactacaggcacacaccaccacgcccggctaatttttgtatttttagtagagacagggtctcaccatgttggccaggctggtctcaaactcctgacctcaagtgatccgcctgcttcggcctcccaaagtgctgggattataggcatgagccaccacgcctgaccttttatatatatatattttttttgagatggagtctcgctctgtcccccaggctggagtgcagtggcacaatctcggctcactgcaagctctgcctcccgggttcatgccattctcctgcctcagcctcccgagtagctgggactacaggcgcccgccaccacacctggctaattttttgtatttttagtagaggcggggtttcaccatgttagccaggatggtctcaatctgctgacctcatgatccgcccgtctcggcctcccaaagtgctgggattacaggcgtgagccaccgcacccggcctgacctttttttttcttttgaaggcagggtttgctacattgccaagctggagtacatcagtacaattactgcaactttgaactcccccaggctcaagtgatcctctcgtctctgcctcctgaatatctaggactacaggcgggtaccactactcctggctaaattttgtttaatttttctgtatagatggaggtcttgctatgttacccaagctggtctcaaactcctggcctcaaaaaatcctgcctcggcccccaaagtgctgagattacaaacgtgagccacagtgtcagcccctagtgacattctacactgtaatctgatttcctactcctgtttgttagcctaaaaccatccccaccagccacaagatcaagtctaaattccttcacacagcatacaaggccttccagggccctggcctccaccctctcttccagccttaatgggtttttttctttttctttcttttttcttttttgagaaggggtctcactctgtcgcccaggctggagtgcagtggcatgatcttggctcactgcagcctccacctcctgggttcaagcaattctcccacctcagcctcccctgtagctgggattacaggtgcctaccaaccatgcctggataatttttgcctttttttttttttttttttttagacgaggtctcgctcagctgcccaggatggagtgcagtgccacgatctcggctcactgcaaccactatctcccaggttcaagtgattttcccatctcagcctcctgagtagctgggattacaggcacctgccatcatgcccagctaatttttgtatttttagtagagatagggtttcaccatgttggccaggctggtcttgaactcctgaccttaggtgatccacctgccttggcctcccaaattgctgggattacaggcgtgagccaccgtgcccagtgcagccttactgttttctttttgtttgtttgtttttttcaagacagagtcttgctctgtcacctaggctggagtgcagtggcacgatctcggctcactgcaacctctgcctcccgggttcaagcaattctcctgcctcagcttcccaagtagctaggattacaggtgcccaccactgcacccagctaacttttgtatttttagtagagacagggtttcaccatgttagccaggctggtctcgaactcctgacctcgtgatctgcccgccttggcctcccaaagtgctgggattacaggcgtgagccaccaagcccgatctagccttactgttttctacagcccctccatctgcagcaattggggacctaccacaatttccccaaacatgtcagcctttgcctggaatgactttcccttcctgcctccttcataatggaacatttggaacttttgcttctctaccccccgctatacctaggccttgctggtcacaaagctgccaaagtttatgaacatcagtcccctccagcgcacgacaccttgagggtgcagactacaccctactcatttgttttgcagcaccccaaaggtttcatcagtttgctgaatatctaaatgaatgcagcactgacattggggctcccacacctcctcgtacccagttcaccttgttgtctcagcctctcctggatgctctcaacagtttcagaccctaaaattaaaatcgatgagagcaccaggtgtttctttttgtgtgattgttcacaacctgcttgagctgctaatggttcagagctgctcctttttaaggctcaagggatgaggctggaaccggttttcatggcagctaagcaaacagtaaaaaaaaaaaaaaatcacttgaattcagctaattcgagtttcatggtaggacaaaggcctgcatcagatgtctgctgagagcttctttatttttccaacctctcctttggggatttatcccttttgatttcatttttcttaatacacagcagctgcatattaatcaggatgctaatgaatcataggcttccctgggcctgcattcaccaattaactttaacaaacaaaatgcgtggtgtcctctctgctggctttcccggttcctaggctggcttctgttgccgaaccctggaccgaggccagagaatgcaagtcagcccaacacagcacgtcgggtgtgcatggcctgcgcccggattgggcagcgggctgggggctgtgaacacagcgctgcgttcatctattatggtctgtccttctaagaagtccctaatttggctgcgaggattaggacatagttcccaagcagggcccacgctggcagggggcccaggagctgcggaggaaatgggtctaagcgaagagaccatctgttcgctccaggtaaagctgtgattggcaggcgactgagccagaactgcccgctggtggggccctccctccgtggcctctaacagatatacaagtaaacaatccgccagccacttatgaccaccgagggtggcagtcccgggagaggaggcaagctaatcaaacattcaaggggggaacacaacagaatctctggcgcttgggcaaaacaatgttttgctgaagtacagccaggaagggggaaggtttgaatggaagctgatgagccagttcctcaacctctccttttctctctggaaacgtgttaacattttaatcatgttgctgagtatctgctgctggatctattaactggcccctgcactggttttaatctatctgttttttggcccagggttcctgtggagctccttgaagtctctaaatgatttgcagcggtctgtgtctcttcactacacagatcctggtctaaacatgctattccgcagtaaggtattagcaaacaaacgacttcaaccattgcttccctttttttttggtctccaattgacagcacacacctataaaccatttcacgcgtggcctgctttccagcagaggaatgtgcgaggagagggaagctggcttgctttctgcctagagtcctcagggccctgtcctgaccctcctctcactccttctccaggtgagctcattcattccacagctgctgctgaaacaatgactcccacagaaccatctccagaccctcaccccaccccgagttccgggtcagaaagttgaactgtatcctggacatgtggatgtccctggccaccgaaagtggctcagataaacaaggacaacacagaactcatgttcttgtctctgccagagaagccaccacctaccggaaaccaccacaagctggaaagcagacagcagtgatgtgcttgtaagcatttagcaactggctgtgtgatgggggggaagccctgattcgtagtgtttgccaatttccgtggtgcagagcctcccaccattagccaatttcaggctaccaacatgaagacgctaaatgccaagttgggaagagatgtgtagaattggctctttcaagccggtaggagctggccccagtacatcatggccgggaaacatcctccctcatccccttcctgtgtcttatggcacaaggcacttcctccatctgccctgctaaaggccaccccccccacaccccccataaaagcctcccactagacctccctacacccacacattctccctcccaaccattctctacaaagcagccatatttttttattaatattttttgagacagggttttgttcttgttgcctaggctggagtgcaatggtgcaatcttggctcagtgcaacctctgcctcccaggttcaagcgattctcctgcctaaccctcccaagtagctgggattacaggcatgcaccaccacccctggctaattttgtatttttagtagagacggggttttgccatgttggccaggctggtcttgaactcctgacctcaggtgatccatctacctcgaactcccaaagtgctgggattacaggcatgagccatcgtgcccggcctgcagccgtatctttttataacgggaacctgagcatgtcacttctgtgacccagcagttcccctcctaggtatgagtatgcccagaagaaatgaaatcatctgtccacacacaaacttttctaaatggatttcatagcagtgctgctcataatagccaaaaagtgaaaaccacccgaatgactatcaacagatgagtggataaacaaaatgtggtagactcatgtggaatattattcagccattgaaaagatgaagtccagatgcagtggctcacgcctgtaatcccagcattttgggaggccactgtatctggcctggagtgatgaagctgttttaaagttgactatgagaatggttgtccagctctgaatataccaaaagcaatcaaatcatacccttcaaggaggtgagccgggcgcggtggctcacgcctataatctcagcactttgggaggccgaggcgggcggatcatgaggtcaggagattgagaccatcctggctaacacggtgaaaccccgtctctaccaaaaatatataaaaaaaaagccaggcctggtggcacatgcttgtagtcccagctactcgggaggctaaggcaggagaattgcttgaatctgggagggggaggttgcagtgagccaagatcatgccccctcactccagcctgggcaacagagcgagactccatctcaaaaaaaaaaaaaaaaaaggtgaaccgtatgctatgggaattatatctcaaagctgttactgaaaaaacctctaggataaagtctgtagcccacaaaatgcctcataacctggccccttctgcagccctccccttgcactcacccctgtaccccactcgctcgcctagccacactggccttcctttagctcccccgaatgccacgagcagggacttcgcacgagctcttctctcaacccctccttccccaccctgcccacactttctgcttcaacatctcttctacaaggacaccttccctggctccccattccaggctggctgcccacaggggaaaggtctcccagcaccatgatctcttccctgttggtgtttggtcagatgcaaacagcaggagggtatgagcatgtctgtctggaggacaggagtgtccctgctgccaatcacaatactgccatatcagcctttttttttttttttttcctcgagacagggtctcactctgtcacccaggatggagtgcaatggtgctatcttggctcactgcaacctctgcctcccaggttcaagcaattctcctgcctcaggctccggagtagctgggattaaaggcatgcgccaccacgcctggctaattttttgtatttttagtagaaacagggtttcactatgttggccaggctggtctcgaactcctgacctcgtgatccgcctgcctcggcctcccaaagtcctaggattacaggttgagccactgcgcccggccaacatgagcctccttcttgctcttttgagaacacatcaagcttattcctacctgagggacttcatacttgcggccccctctgcgtggaaggtttgggcccagaatgcctcctggctggcctcttctcatgtgacctcttcagagttctccaactgctctaaggtccctgtcactctacttgctccttactatattttgtttcttcattccacttacttgccaccagttgaaatcacattattcacttatttatttttgagacagggtcttgctcttccagtgcagtgaagcaatcacgtctcactgcagcctcgacctcccaggctcaagtggtcctcccacctcagccttccaagtagctagggccacaggtgtgtgcaaccgcaccacaccacgctcatttctttctttctttctttcttttttttcagagagatatgtctccctctgttgcccaggctggtctcaaactcctgggctcaagggatcctcctgccttggcctcctgaatagccaggactacatgcatgcaccaccacgcctggctgatttttgtgtttttagtagagacggagtttcaccatgtgggccaggctggtctcgaaatcctgacctcaagttatctgccagcgccagcctcccaaagtgctgggattacaggcgtgagccactgcgcccagcctctactatatatatactttttttttttttttttgagacagagtcttgctctgtcaccaaggctggaatgcaatggcacaatcttggcttactgcaatctctgcctcccaggttaaagcaattctcctgcctcagccttctgagtagctgggattacaagtgtctgtcaccatgcctggctaatttttgtagacacagggtttcaccatattggccaggctagtctcaaactcctgacctcatgatctgcctgccttggcctcccaaagtgctgggattacaggcgtaagccaccgtgcccggcctactaaatttttcttttttcttttttttgagacggagtctcactctgtcaccaggctggcatgcagtggcatgatctcggctcactacaacctctgcctctggggttcaagcgattctcctgccttagcctcccgagtagctgggactacaggcgtgcaccacaacacccagctaacttctgtatttttagtagagacggggtttcatcatgttagccaggatggtctccatctcttgaccttttgatccacccccctcggcctcccaaagtgctaggattacaggcataagccaccattcctggctttttttttttttttttgagacagcgtttcggtctttttgcccaggctggagtgcaatggcgccatctcagctcactgcaacctccacctcctgggttcaagcgattctcctgcctcagcctcctgagtagctgggattacaggcatgtgccactatgcccagctaattttgtatttttagtagagacggggtttctccatgtttgtcaggctggtctcaaactcccgaccttaggtgatccacccgccttggcctcccaaagtgttgggattacaggtgtgaaccactgcacctggccaatattttttaataaattggcccgacattctggcccgcctctagtcccagccatttcggaggctgaggtgggaggatcacttgagtctgggaggtggaggttgcagtgagccgtgatcatgccactgcgtggtgacaaagcaagacgctgtgttaggagggaaaaaaaaagcagcagacactggcatagccttgtggaagaaaagggtgaatgagagggacccaggggcctgtgtagacccatagggctgggatcttcctcacctagctggccctccaccagcttcctcctcgcagttctcttcccaccgcggatgctccttgctctcccccaagggctgcggttcctggtctttgcatttcacatggggcacgtccacctgcaagcacagtcaggacggaggccaaggagggaggatgaggagtgaacagatcgccctcctgccgacccttcaaccctggtcacctcgatgtgctgctgcgggacggtggggacccgcaggaaagacgggcagggctggggcaggtgccatgagggcaggggcatggggtgaaaggacactctgtccctaggggacaccaggacaccagacctagaggggccgggtgagggcagggctgtgggaatgtaactggaggacctgggctcctaactggtatgtgtgttggctggagtccttcgagaaaggagaagaggtaggagaaaagagatgaggccgggcgcggtggctcacgcctgtaatcccagcactttgggaggcggaggcgggcggatcacgaggtcaggagtgcgagaacagcctgagcaatatggtgaaaccccgtctctactaaaaatacaaaaattagctgacgtggtggtgcgtgcctgtaatcccagctactcgggaggctgaggaaggagaatcacttgaacccgggaggcagaggttgcagtgagccgagatcacgccactgcactccagactgggcgacagagtgatacttcgtctcaaaaaaaaaaaaaaaaagaaatgaaagaaacgggtgcggtgcgtgggtgtttgtgcctttctctactccgttccggccacgcgccatgtgtggaaatcagacccgtcagtgcgtcagtcagggccgggttcagtcagtcaggaaatttgaggccaggcctgatgagagggagccccaatggcaaaggacaagcggccgggctcgggtccgctggagatggctgggatcgcagccgttccctgcctatctgtccgcccgccccacgcgcgagaaggaaacaagcgccgcgtactccctgtcgctccattccgtattttcccgccttcaagctcgcaccctctgcgcatgcgccgaccccgcccctggccagctgcgctcccgcggacgagtgtgttgtgacgcgtgctcccggccccgccctctttgagaacttgcgcggccaactgggcggggccgaccgttaagcagcagtttcgcggtccgcgggctgcgcgcgcagtcggcgccccttgggagcaggacggcgcgctctgggtgcgcttgtgtgcccctgtgaggctcctgggttccacggggcgcccaggttatacggatctcagagtcctgtatttattcggtgcttctaacttcatccactctgccttggaaaatatactccataacaatttttttttttttttgagacaagatcttggtctgtcgcccaggctggagtgcagtggtgcgatcacagctcactgtagcctcgacctcccaggttcaagcgatcctcctgcctcggcctcctgagtagcagtgtcattcaccaggcccttctaatttaaaaatatttttctggccgggcgcggtggctcacgcctgtaatcccagcactttgggaggccgaggcgggtggatcacctgaggtcatgagttcgagaccagcctagccaacatggtgaaactgtctctactaaaaatacaaaaaatagccgggcgtggtggcgggcgcctatagtcccagctactcgggaggctggggcaggagaattgcttaaacccaggacgcagaggttgcagtgagctgagatcatgccactgcactccagccggggtgacagagtaaagctccgtctcaaaaaaaaaaaaaagattgtatgtatatatacacacacacacacacacacacacacacataattatatttttttttcctgtagaaatgagatctcactgtgctgagcccaggctgatccccaactcctgggctcaagccgtcctcccgtcttggtctcccaaagtgctgtctcaaaaaaagaagaaattatctgatctaccctattgactgtaggtcataagacccccgtttcaaagaagtttctgccccacacaaggcctatctatctagattcttcttggcctctctgagcatgcattcctgagactccaagaagaatctagacagataggccttgctgggtttccccactcagcctattagtattagacgacccccccggctttttttttttttttttttttttgtcttgctctgttgtccaggcaacactggagtgcagtggcaagatctcaactcgctgcaaccttggcctcccaggttcaagcgattctcagccaaccaagtagctgggattacagatgcaccatgcccagctaatttttgtatttttagtagagatggggtttttccatgttgctcaggctggtctcaaactcctggcctcaagtgatccacccgcctcagcctcccaaagtgtcaggattacaagtatgaaccacgacaaaccctttttgtccaatcaaatttctacctgggtgttcaaactttgctgaacctaagcataagacacttttcattaatcaggcatggtggcgggcacctgtaatcccagctgcttgggaagctgaggctgctgtgagccaagatcgcccctacactccagcccagggaacagagccagactccgtctcaaaacaaaacaaaacaaaaacacagtttcccctgtatctctggatcttcattctgaaggcttgtcaggtaacactatgatcaaatacattcgtattccttttctcttattaatctgccttttctcagtaatttttagtgaaacttcagagggcaataaggaagctttctcttcacccctacacagccaaagttcagatttgatggaaatggcaagattccagggtacttgtgtttatttagacacataaatatgtatttaacgacagggtctcactctgttgcccaggctggagtgcagtggtgtaatcacggctcattgcagcctcgacctcccaggctcaagtgatcaacctcagtctctggagtacctgggattacaggcatgagccactatgctgagctaatttttgttttctgtttttgggggacaggtctcactctgtggcccagactggagtgcagtggtgtgatctcagctccctacaacctccacctcctgggttcaagtgattctcccacctcagcctcccagatagctgggactacaggtgcctgccatcatgcctgctaatttttgttttttgtttttttttttggaacagagtcttcttctgtcacccaggctgtagtgcagtggcacaatcttggctcactgcaacctccacctcctggttcaaacgattctcgtgcctcagcctcccgggtagctgggactacaggtgctcaccaccacgcccagctttttttttgtatttttagtagagacgggttttcaccacgttggccaggctgctctcgaactcctgacctcaagtgatctgcctgcctcagcttcccaaagtgttggaattacaggcgtgagccaccacgcccagcctaatttttttttttttttttttgagacggagtcttgctctattgcccaggctggagtgcagtggtgcgatctccgctcactgcaagctccgcctcccaggttcacaccattctcctgcctcagcctcctgagtagctgggactacaggcacccgccaccacgcccggctaattttttgtatttttagtagacagggtttcaccatgttggccaggatggtctcaatctcttgacctcatgatccacacgcctcagcctcccaaagtgctgggattacaggcatgagccaccgcacccagccctaatttttttatttttagtagagatggggtttcaccacgttggccaggctgctcctgaattcctgacctcaagtgacccacccaccttggcctcccaaaagttctgggattacagaagtgagccactgtgcctggctcagtacccatactttttttttttttttttgtatttttagtagagacggggtttcaccctgttagccaggatggtctcgatcgcctggcctcgtgacccgcccgcctcagcctcccaaagtgctgcgattacagacgcgggccacctcgcccagcccagtacccagaattttgaccatcaagtggcacactgagctagggggacccaacaagacccctcacccctaaggaaagccaccagatgggggcaactgcccactttattagacaataggtggcccacaggtctcctcagggcccaccctcacagtagacacaccacacaggacaacagaaggaacctgctacccagtcctctgtccctgggattctggtcctgggacaggtgggaaagaggaaggtgggggctggcctcacagaggcctcataaatacaaggtcactggccagggatgcaaaggagcgcagcagcagggactcggggaggatgacctgtcctagagtggcccatgtcacgcagcctcctgtgtgggagggggcctcggctcggcatccaggcggcacaggggactgtcatacaccatctgcaggttcaccttgtggcccaccagctcccggatattgttgatgccatatttgatcatcgttgggcttgtgggggagggaacagagtttatcatgaggtcagcacgtgcacccttctgctcagatttccatggctcccatcttcttcagaggaaaagttcaagttctccccatgacccacagggccctgcgccaactgctctatcacctctcaccctccgccttcagccacaccagcctcctcactcttctcctaatacaaaaagcacattcccacctctgggcctttgaactgactgtgaccactacctgggacacccttccccagatactctcatggtttacctctttatctacctctagattttgcttaggtggcacttcttcctccatgatgccttcactgaccacgtagttgccttagccctccctataccacttactgccctggtacacacttctgtcttcttttgctgagtgcatttgtttttttgaaacagagtctcactctgtaacctagggtggagtgcagtggcgtaatctcagctcactgcaacctccgcctcccaggttcaagtgattctcatacctcagcctcctgagtacctaggactaggactacagacgcacgcaacagtgcctggctaatttttgtagttttagtagagacgggagacagagtcacactctgttgtctagactagaatagagtgcagtggcatgatcttggctcactgcaacctctgcctcctgggttcaaacgattctcctgcctcagcctcctaagtagctgggattacaggcacctgctaccacgccaggctaatttttatatttttagtagagatgaggtttcgccatgttggccaggctggcctcgaactcctgtcctcaggtgatgcacctgcttcagccacccacagtgcttggattacaggcatgtgccaccacgcctggcctgtttttattctttgtagaggcggagacttgctctattgcccaggctgatctcaaactcctggctcaggcgatcctcctgccttggcctcccacagcactgggatgacaggcatgagctaccacgcctggcctgatgtacttgttggtcttgctagttatcatccttctcgctccactgggaccccagattcagagggagggacataagctgtcatgttcacagcacggggctgagcattcagtttgtactcacgatgaaagttttgtccattggatgaatgaatgggtggtgctgaaaccacgcaggcccctatacctggagagttatttgaggcagctggacaccccgagtttccacttgggcacttaccgctccagggagaggccccaggcaatgaccgacacgttctcgggaagccccatgggcagcagcatctctggacggaagacccccgagtttccgacctccacccacttcttcaggcctgcagaggcaggacagaaaagacgggcagtgcgtgttgagtttctgggcactgctggtacaggttctgggtctaggtggtgagcttgggaggtggggtacaggcatggcaatggggggacccaggccaaaccatagtagcctgagacctccctcccaccccagtaccagggcctaccctgaccttggtggtagctgaacacctccatgctgggctctgtgtatgggttgtaggctggcttgaagcggagttgcgtgatacctgcaggaagtggggggcgggcaggagagcaggggtttggaggataatgctggtgatcaacacacctgcccgctgcctcaccaccatggcccacccctgcccccctgctcacccagcttggtgaagaactcccgcagaacgcccatgaggtggcccaaggtgagaccatgatccgccaccacgccctcgatctggtggaactcagccaggtgcgtggcgtccagggtctcattccggaatacgcggtcgatggagaagtacttgaccggagtgaagggcttctaggggtgacaaccgagccaggcccaggtatgggtcagaaggtccctttgacagcaccctctccccactggggcccccgcctgggccaaccgcaccttctgggcaaggcggtagagcgcacgggcgctggctgatgtggtgtgggttcgcagtaggtttttccgggcctcgtccagcttccagttatacttgtaccttcaggagggaaggtgggaagtccatgcaatggcccaggggtccccagcctccttcccttccataccaggtaagtcctgcctcacccctgtgagccgtagccgccctgagagtgggtccgcttgacccgctggacatagtccattgggagctgcagggcctccgctggatctgggcaggacagagcaacatcaggtcagtcaacgagcatttcccacccctttttttttttcagacagggtctcactgttgtccaggctggagtgcggtggtgcaatctgggcttactgcaacctctgcctcccaggttcaagtgattctcgtgcctcagttttctcatttgtgtgtggcttttttgggttctttttttttgagacagagtcttgttcagttggcccagctgaagtacaatggctcaatcttggctcactgcaacctccacctcccaagttcaagcaattctcctgattcagcctcccaagtagctgggattacaggtgcctgccaccacacccgggaaatttttgtatttttagtagagatggggtttcgccatgttggtcagggtggtctcgaactcctgatctcaggtgatccacccacctcggcctcccagtgttgggattacaggcatgagccactgcacctgggctttatttatgtatgtacgtatgtatgtatgtattttgagatggagtcttgctctgttgcccaggctggagtgcagtggcatgatcttggctcactgcaacctcctcctcccaggttcaagcaattctcctgcctcagcctcccaagtagctgggattacagaagtgcaccaccacacacagctaattttttatatttggtagacgtggggtttcaccatgttggccaggctggtctcgaactcctgacttcaagtgatccgcctgcctgggcctcccaaagtgctgggatcatgccaccgcgcccgacctttttattttttctttttttttgagacggagtctcgctctgtcgcccaggctggagtgcagtggcgcgatctcggctcactgcaacctctgcctcccaggttcgagtgattctcctgcctcagcctcctgaatagatgggactacaggcacacgccaccatgcccagctaatttttgtatttttagtagagatgggatttcaccatgttggccaggatggtctcgatccacccaccgtggcctcccaaagtgctggaattacaggcgtgagccaccgcgcccggcctattttttttttttaaagggacaaaattttttttttttttagacggagtctcgctcagtcacccaggctggagtgcagtggcatgatctcggctaactgccagctccgcctccagggttcacaccattctcctgcctcagcctcccgagtagctgggactacaggcgcccgccactatgcctggctaattgtttttgtatttttggtagagacggggtttcactgtgttatccaggatggtcttgatctcctgacctcgcgatccgcccgtctcagcctcccaaagtgctgggattacaggcgtgagccaccgcgcccggcctaaagagacaaagtcttgctctgttgcttggcctgcagtgcagtgatgcaatcatagctcactgcagcctcaaactcccaggctcaagcaatccttcacctcagcctcccgagtagctgcaactacaggcgtgcactactatgcccagctaattttatttgtacagatgggtctttctatgttgcttaggctgttctcaaactcctgggctcaagcgatcctcctcccttgccctcccaaacagtgggattatacccactgaggctggccaagtttccttctttgtaaaaaggggtaacagtactgcttccagtagttggcaggaagattagaatagtggctagtatgtgatgagtgcttagtaagttttgggtgctatgacaataatgacaagaatgatgttgctcctctggccaggtaagccggcacccaatgacctcaactgccctcttggtcaggaaggccaccccattgtgggaagtcattccatttcagacagtgctaagggcaatgaaagaaagaaatgggacagaagaatgaacactaggggagaagggcttctgtagaactcggggtgagcccgggagtgttaggctggcctgtctctggtgacacgtgagcagagatttgaggctgcagcctgccttgaagatctgggagaaaacagctcttggctaaagacggaacataagcaaaggccctgaggtgtgcacggcctggaatgcccaaagaagacatgggggcaggcagggtgtgggggctcatgcctgtaatcccagcactttgggaggctgaggcaaaactgtttgagatcaggagtttgagaccagcctgggcaacatagtgagaacaaaacaaaacaaaaattcattaattttgggctaggcgtggtgctcacgcctgtaatcctagcactttgggaggctgaggcgggagtatcacttgaggtcaggagttccagaccagcctggccaacatggcaaaccccatctctattaaaaacacaaaaattagccgagcgtggtggcgggtgcctgtaatcccagctactcaggaggctgaggcaggagaatcgcttgaacccaggaggtggaaattgcagtgagctgagatcgtgccactgcactctagcttgggcgacagaatgagactgtctcaaaaaaaaaaaaaaaaaaaaaaaaaagccaggtgcggtggctcacgcctgtaatcccagcactttgggaggccgaggcagactggagtttgagaccaccctggccaacatggcaaaactccatctctactaaaaatacaaaaattagctgggcatggtggtatgcacctgtaatcccagctactcgggaggctgaggcaggagaatcgcttgaacctgggaggcaaagtttgcagcgagccaagatcatgccactgcacactccagcttgggcgacagagtgagaccctgtctcaaaaaaaaaaaaaaaaaaaaaaaagactgcaggtggcataatgagaacagagcttgacacatccaacaaggatggactttaatttaactcaattaatttttttagaggtagattcttccctatgttgcctgagctggatttgaactcctgggctcatgcaatcctcctgccttggcctcccaaatagccggactacaggtgcacaccaccatgcccagttctagacctaatttgatcaaatgggatgcccatcctgtaaaggctccgccgtggcctggtgtctctcatgtctcagggaggccctaggggctgacccacctcgaaggaagaaggtgtcgtgctggtcacgggctgggtgctgctggggctggaagagggcgtcaaagttccagaaggagctctcaatgaagttatcagtcggcatctcggtgaacctggtgggagacacagcctgactgccctgcctgtacccagcagaagcaccaggcaccgcccccagccctgtgctcaccccatctccaggaagatctgtcggaactgggagcggaccttgagcagcgggtgaaggtggccgctgtcggggaggacaccgtgggccaagaagttgtagggcttgaagggccggtcccgccaagagccactgggggaggatgcaagggcctggtaagggctgcccgcccctgccccctgccccagctcccacctgccctgaccctggggttgcctgctacctggagatcatctctgggctcagctctgtctcttgcttggagatgctggtactaaaggcactgcctttgctcacccagtaggtcttcagagtcctgtggccaggggaaggaaggggacgccactgccatctcctcctagaggacttccttgatctcccgtctgatgaggatccccatgctacctaccaagtcactctgctttatttccatcctgacatttatcactacctgaaatcctcctatgtgaccatgctgtatctccctgtattcactcactgattcattcaacacttactgagaacctaatgtgtgccagggtctgttcaaggtgctaagtacacgactgagtgatgatactagggaaagtctagcagatttattctgtgccaggctctgttctgcaaaagtctccccacaagccccggaaagagggcagttttttttatttgtttgtttgttttccttttttgagacagagttttgctcttgttgcctaggctagagtgcaatggcacggtctcagctcactgcatcctccacctcccagattcaagcgattctcctgcctcagcctccagagtagctgggattacaggcacccgccaccacacccggctaagttttgtattttcagtaaagacgaggtttcaccatgttggccaggctggtctcgaactcctgacctcaggtgatttgcccgcctcggcctcccaaagtgctgggattacaggcatgagccatcgtgcctggcccctttttctttgagatgggggtctctctatgttgcccaggctggccttgaattcatggattcaagtgatcctaacacttcagcctcctgagtagctgggattacacacgtgagccacacacttggcccaggctattttatagataaggaaacggagaccagcaaaggccaggtgacttggccaaggtcataaaactagttaagtgacagagcccgaacttcagttaggcatcccagctctagtctcttctctctgccactctgtgtctgctcaaaggggacatttgtcctgtgagaggacggcccctagcccatctaggttccagaggcctgtctggtgtgtgttcattaaactttggaccacactaaggacagtgaaagaaatgaacaagcaccaaagatgaagactaggggcgatgggcttcatggaactcaaggggagaggagggctgtcagggtggcctctttaaggggacacaggagagagacttgatgaggagcctatcttgaagatcagagggaaaacagttctcagcagaagggtcctcatgggcaaagaccccaaggcacgtaggcttgacaactatggcattaagcgagctgggaggaaactggccacacctgtgcttggtgtgggcaagatgtctccctcccaccatgcctccaccatgcttcgcaggtggtgggggcctgagcctgcagggggcacccactcacacttcagccaacagcttcctcttcctcagctcgctcctctccttctcccccagcttctcagcctgtcccccccggaccagctggagccgccgctgcacctcatcctccatgctgtccacctgccaggataaggagtgtgaggggtatgagggccaggggcccatgtgcccgtccacctgccccctgaccagcccgcaggaacgcaccactcggaacacccggggcccgtcagccgcactcttgtccacccgaatccacttgttggacatggccttgctgaagcccactttgccactgggcagtcgctggaaaagagaggctgcagtgagtggggcacgagggccaccttcatcccatcactcactccccattcaccccgcagctcctaccataagctcgctctgggccaggccctctgggggaatgcttcgaaacacacgggcctcatggctgccctcccgggcaatctcctcgccctccgcagtaagctcccagtgcttggtggaccgaagttcagcctcgatgacctagagggaaatgtggggagggtgtccaggcaggggtgaggctcagagccaggcaccccctttctgcagcgctgggtcccaggttgaaagcacagcccttaaagctaggttcacatcccagctatacaactttacagccaagtggtctcaagggaaagacttccccttgctgtgtctccatttcccttatgtaacacaggggtagtaataatgatagtttacacctcccagggtaaagtacaccactaaagatgttacctggcagaagacaaattctgtcggttttgaacctgtgacagattttaatgtgaaaaattaggtgaactgatatgtctccacatttttttgtttgtttttgttttctttgaaagggggtctcaccctgtcactaggctgggtgcagtggtgtgatcatagctcactgcagcctagacctcctgggctcaagcgatccttccgccagtcccgagtagctgggactacaggcatgtgccgccacacctggttaatttttaaattactttttttttttgagacggagtcttgcactgtcgctcaggctagagtgcaatggtgcgatctcggttcactgcaacctctgcctcccgggttcaaatgattctcctgcctcagcctcccgagtagctcggattacaggtgcccaccaccacccccagctaatttttgtatttttagtagagatggggtttcaccatgttggccaggctggtctcaaactcctgacctcgtaatcggccgactccgcctcccaaagtgctaggattacaggcgtgagccgccgtgcccggccctttaaattactttttaaagacagggtgttgttatgttgtccaggctggtctcaaactcctggcctcaagtgattctccttcctcagcctcccaaagtgctggcataatgggcatgagccaccatacccagcctgtctccatgtttaaatgttcacatgtcagtgcccagaatgtcagagacgggccctggaggtccacattacaaacaaaaactgaggttccaggtccagagtcatgaagacaaggacaacaagggtaagtagagtgcacagggcctggctcccacttcattctaatcccaactctgcccttcacttactgtgtgacctcaggaaagttgcttaacctctcagtgactcttctcatccataagagaaaggtgtgatgggttctacctcagatgattttaaggagtagctaaattaatactcagaaagaatatatagtgcctaccacgtgacaaacactgcataaattttttttttttttttttttgagacggagtctcgctctgtcgcccaggctggagtgcgatctcggctcactgcaacctccacctcccgattcaaacaattctctgcctcagcctcccaagtagctgggattacgggtgcccaccaacacgcctggctaatttttttttgtatttttagtagagacagggtttcatcatcttggccaggctggtcttgaactcctgacctcgtgatccacccgccttggtctcccaaagtgctgggattacaggtgtgaccactgcacccggcataaattctaattactataattatttttatggctattactgtcattagattgaacctcacctccttatattatttaaccctctgtgacgtatacaaatgtcagatcatattggtcaaggcactgtcaccccacacaacacagctgccatctctcctctgcattgaggactatgggctctgcagcctgagtgcctaatttcaaatctgggctcatcggcctcttctattcacactgattatgttactgaccatcagttgtcacatctgcaaaatgggaataacatggccatcagccaggattatggaatggattggacaaacaagctgagaccaaagtggggcacagaacatgagctctacggataaacagcccagatcctggccccatggatctagccttctgggtggcccacgggcccctcagcatcctacgcctgtgactctgtcactgtccacttgcccaagtcagaaggctggacttcatctgtgcgccccctgccttgtcctgaatcccacgccttccccacctcccccaagcttccttcccatagccagacatcatgccctccagcttggggaagtgccagcttcttctttcatcccttcacctccagtcctgtccatgccaattcttcccaaaggtgatgtggatagcacactcatctgaccggctctagctcctgctatcgcttcccagttccctcatgaggtaaagacctaagaggctttgcaattacagctatgctggtctcccttgccgcctgccatcccccaagatcccggccactgatctctaaagtgctatcactttcctcaacagagaacagactcagccgtcacctgcaccaggccgctctccctgacccccaaggctgggtcagctgtcacagctgggtcccctgttttcccccatcactctggttcttgaagcaccttcctattacgtcgcaacctgcgtgagggcagcaaccgcgacttcctcgtccatcatcgtaccctctacccacgctgaccgtgcctcaataaacgtttattgcatgaggaacatccgtgcgtctgggccctcactcgtcccacttcccgcccgcacatcccggagtggacacatatacagctaccccaaactaggcctgagggaatttggcttggacgtagagcgcccgtggcaaggggactgtaggtgcaagggcaaggcggtccggcatcacgggcccggctcacctcgcccagcgcctgaaggctcttcacggcgcccaccaccgcctggtgctccatgcccagctcagccgccaactcggcgctgtccaggccgccatcagacgcctccagccgccggagcagcagttccgccacctgaccatccgccatgactccttccagtgtgctcagcgtgtccgggcccgggtgggcggggggagctgagccaccggaaccggaaccggagtgtgtaccgccatcttgaatgtgtctaactgtagaacagggctcaatgtgtcgtcatcttgagtgtggcgacggagccgcaaaaggtgcatgggactcagttcccacctccaccctggctccatcaatggcgtctggttgaccagaggggtaaaattgattatctcaaggtcagaagcaccgccctgttttgagttttatctagcctcacttcgagcgggctgtgtgaccttggacttccccgtctctgggttacagaaccctctgcccttctggtattctctcttgccctaggagaggcggtgggtggtgggctccagagatggtcattttggcgatgtcagctacttttaaaatttcaaaggaaggctgggtaggtaccgtccctttttatagagggaaaaggaattcacctagtaagtcaaggtggcacctaacctgtgtggactacctcgtatgtggtagtacttagcccagaactgagtacttcacgtgtagtatttcatttatccccaaaactttatgatgtagatactgatataaccgcattacacatgtgagaaaactgaggctcagagggtggtatgacttgcccaaggttctacagagagttggtggaaatgaagtcataaattataaaccttccagatcctcccacccctgtgcgctgagagtaacgtcagtgcaaatactgcatggcctagattagcactgtcctatagaaacacagtgcaaaacatctttcttttttgagacagggtcttgctctgtcacccatgctggagtgcagtggtgcaattatggcttactgcagccttgacttcccaggctctaaggatcctccaaccttaggctcctgagtagctggaactgcaggtgcgcgccaccacacccagctttttttttttttttaagtatgggttttggccatgttgcccaggctggtctcaaactcctaggctcaggttatcctcctgcatcggtctcccaaaatgctggcattagaggcatgacccacctcgcccagccagccagaccctgactcttacaaaaaaaaagatgactaataaaatattttgcactcggccgggcacagtggctcacctctgtaatcccagcactttgggaggccgaggcgggtggatcacctgaggtcgggagtttgagaccagcctgaccaacatggagaaaccccgtctctactaaaaatacaaaattagcagggcgtggtggcgcatgcctgtaatctcagctacttgggaggctgaggcaggagagtcgcttgaacctgggaggcagaggttgtggtgagccgagatcgtgtcattgcactccagcctgggtgacaaggcgaaactccgtctcaaaaaaaaaaaaattgcactttttttcatactaaatcttcaaaatctgatgcgtattttacacttacaacacatctcagttcggaccaaccacatttcaaatggtcagtaatcacatgtgggcagtggtgacttacgtcagcacaggtagattagaatcctagatctgctggccaggctcagtaatcccagcactttgggaggctgaggcgggtgaatcacctgaggtcaggagttcaagaccagcttggccaagatggcgaaaccccatctcctctaaaaacacaaaaattagctgggtgcagtgggggtgcctgtaatcccagctacacgggaagctgaggcaggagaatcacttgagcctggtaggtggagcttgcagtgagcagagatcgcaccactgcactccagcctcggtgacagagcaaggctctgtctcaaaaaaaaaaaaaaaaaaaaaaaagaatcctagatctgttatttatgtcattcaaccagaaggtgtagtctttctgtgcctcagtttcttgctcacatggaggtgattggagcccaggttactgtgagaattaaatgcccacacatattcacactgcttactaaattgagtgtggcccatgttcgaacactcttataagcagaacacatttattccttttacatcacaattattatttgagtctgtaaaatgggattactcatatccccaaatcctgaccctatatgaggttctgtattaaggatacatttctcaaagtcccttctctcctcccattttatgttgattatttatttatttatttagggagtgggtctcactctattgcccaggctggagtgcagtggcatgatcttggctgactgcagcctccacctcctgggctcaagcaatcctctcacctcagcctcccgagtagttgggactacaggtgtgtaccagcaggccaggctaatttgtgttatgtatattatatattatatgctatatataatatacatactattcatatatttatgcattatatgtcatatataatatattacatatgtgtacatatatatattttgtaagaatgaggttccaccatgttgcccaggctggttttgaactgccgggctcaaacaatctgcctgcctcaggttcccaaggtgctaggattataagtgtgaactaccatgtccggcttatttttatttatttttgagacagggtcttgctctgtaacccaggctagagtgtgcagtggcaacaacacagctcacggcagcgtcaacctcctggtctcaagtgatcctcctgcctcagccttctgagtagctgggaacacaggcaggcgccaccacgcctggcaattaaaaaaaatgtttttgtaaaaatggcctcctgctatgttgcccaggctggtcttgaactcctggccttaagcattcctcccatcttggcctgccaaagtgttgggattacaggcgtgagccactgtgccccgtgtgtttttagttaatttccacaagagtccttccttcctctcttctatcatgcagcaagtactttttaagcctgttctgtgccaggtgctgcaggtgacactggaggatgcgaagtgaacaaaacaggcagtgtctaacctcaagtaggaagcgccaagcccacaggtgcctgacacaggaacaggaggaagggtcagcaagaggcctgggatggtccccgggatcctcatgggggggaccagactaggcaatactgaatactacctagaggaagtggtagaaccccaacttcccagttcattctcccccgtctttttttcgagatggagtcttgctctgtcacctgggctggtgggctggagtggagtggcgtgatcttggctcactgcaatctctggctcccaggttcaagcgattctcccacctcagcctcccgagtactgggattagaggcacccgccaccacgcctggctaatttttatttatttatttatttttatttttagtggagatgggttttcaccttgttggccaggctggtctcgaactgacctaaaatgatctgcccgcctcggcctccccaagtgctgggtttacaggcgtgagccactgcgcccggccaccatttcttttttttttttttaaccagagacccttgccaagtcattccccccactccactttattttccttttcattttttccttcctctcttttctgagtcacaaccattagccaggaagcaccccctccccaccctctttcctggatccccctcattccctccttccatagtccactcccgcgctcccaggtccagggcttatttgcccagagtttggaaaacccccagctctccttcctcctttctacagcgtgggggcagggtactggtgccagtcacgtgcctctggcttctgaagaagactctagactggggtcggggggtgggtcctgcccatctccctagcatcttatcgtccctaccatctgtgtcttttttccctccccaaacggaaccccctgccctctcgcctgcctatagccgtttaattgcaaaagccaggccgtttgtgggagaccacagacagcgacccccttcatttaccggttgagaggagggtaaaggggcggctgcaatctgggtaataaccctatccccactccagaagtcacagtcacatcgttaagccttcctcccctcttgtcccaggacagctttaaaaacgttaaaagcatttctgctgggtagcatctggccagggtcgccccctctgtctgctcaggaacgtctgtcacttcagagagcttaagtgacttgccccggtcacacagcagcagtccgataggctgccagggctctaggggcagaaggaggagagggctggcattcttcccaccggcccgcgtgactgtagcaccggggtgcagcgaagccccaagggccccaatccgtgagctctctcccatcccaggcaggggtgggggagcagcagtggggtgctggttctcaaatgcaagataagagctggctaagaaagccttgcccagcccctccacctagagggaatgggagggagagaagctgagggcagggtcccggtcccgcgtggagacagctgcgctcccgcggtttctttaaacgcccagatgggcaacgacgcgcgcggacgagggcggggttgggttcaggtctggtcacatgacctggcctgaggtgctcgcggcccccaccccaccagtgggcgtcccccccacgcgtggtcgaccatcattggtcggtggtgaggccaatagaaatcggccatctgggaacccagcgttccgaggcgcagcctaacatagtgaaccgacgaaggtccaatggaaaaagacggccatgggcatagaccaatgacaaagtggcaggggcgggcccaagggctgggtcaggttggtttgagaggcgggtgggtataaaagtgcaaggcgggcggcggcgtccgtccgtactgcagagccgctgccggagggtcgttttaaagggcccgcgcgttgccgccccctcggcccgccatgctgctatccgtgccgctgctgctcggcctcctcggcctggccgtcgccgagcctgccgtctacttcaaggagcagtttctggacggaggtaacgcctggtcccgcctcgaggccgccccgacgacgcggccggcccccgatcctggatctgcgttgtcgcccgtaattaccgtttagaggtccaacacggtggcctcccgggactagagccgcgggcgatttctcttctgcgtccctggggagcgcggagggcgtagcggcctcccgcggcgggagttagggttagcccgaggatctctgaaggcacccgacgtgtcaaactagaggttggaatggggagtgtcggggatctcctttcctgtccccagcagcttgtggctctcggcagatgtttggtgtggggggggattagcacagccgctctgacctacccctctaatcccccacttagacgggtggacttcccgctggatcgaatccaaacacaagtcagattttggcaaattcgttctcagttccggcaagttctacggtgacgaggagaaagataaaggtaagagcctaggagtgggtgctcagatccgggaggacttcctggcagaagtccttgtctgtacacacacagccgggacagtccccttggaggaggacaggtggaggaagtgggggagtcttctctattctctaagtcgagggtcctcgcgagtcaaggcccaacggtgacctcactaccgtcccgtctcaggtttgcagacaagccaggatgcacgcttttatgctctgtcggccagtttcgagcctttcagcaacaaaggccagacgctggtggtgcagttcacggtgaaacatgagcagaacatcgactgtgggggcggctatgtgaagctgtttcctaatagtttggaccagacagacatgcacggagactcagaatacaacatcatgtttggtgagggcctgcttcctggtgctgatctctgtcccattagttagagggagacccagaccccattgactttcttaataatgattttttttggaaggggagctaaaagaataagtcccagcaacaatttattgcattatgatcgcagatctaggctgttaatttaatttgcgtgtttgtatatagttatttcccaatcttactaatgaggattttgagttctagagcactgattttttttttttctcctttaaacttaaggctccacccacagcccattcaggacagaatcagggtctgagtttctcttctcagccttgacagacccgagttgaagaaccaggtcttccttttataaagaggggtgagagcctcgagatgatgggtagtctctgactcttaactggatctgcttcacacctaggtcccgacatctgtggccctggcaccaagaaggttcatgtcatcttcaactacaagggcaagaacgtgctgatcaacaaggacatccgttgcaaggtgtgcctgggggtggtggcaaatggctgtcatggggagattcagaggtcagcctcattggggggtggcccccgctcaccttcttccttcttcaggatgatgagtttacacacctgtacacactgattgtgcggccagacaacacctatgaggtgaagattgacaacagccaggtggagtccggctccttggaagacgattgggacttcctgccacccaagaagataaaggatcctgatgcttcaaaaccggaagactgggatgagcgggccaagatcgatgatcccacagactccaagcctgaggttggtgtttgggcaggggctctgctctccacattggagggtgtggaagacatctgggccaactctgatctcttcatctaccccccaggactgggacaagcccgagcatatccctgaccctgatgctaagaagcccgaggactgggatgaagagatggacggagagtgggaacccccagtgattcagaaccctgagtacaaggtgagtttggggctctgagcagggctggggctcacagtggggagtgcaccaaccttactcacccttcggtttccttctcccttctgcagggtgagtggaagccccggcagatcgacaacccagattacaagggcacttggatccacccagaaattgacaaccccgagtattctcccgatcccagtatctatgcctatgataactttggcgtgctgggcctggacctctggcaggtgagacttggaggaaaaaggaggatccctggggtacctcaagtgcataagatcacccaagaggaaagggacagggtaggcaccccaggtgagtctgactcaaaaatggtacttcttgtaaacagtacttcctggtctgtccctgtgaagtcctcacagcaacccctttaaggttatacttgctgtgcaccaagtacttccccaagtacttttatgcaaatcaacttctttacccccaaagacctagaaggtggtcaggtaacccagttagttagctggggctgggcacagtggctcacccttacaatcacggtactttgggaggctgagacagaggattgcttgaggccaggagttacacaactcaacctagcttggcaacacagcgaggagaccctatctctacaaaaaaaatttttttttttgagacagagtttcactcttgttgctgaggctggagtgcaatggcacgatctcagctcactgcgccctccgtctcctggtttcaagcgattctcctgcctcagcctccggagtagctgggattacaggcatgtgctactatggatgccaggctaatttttttttttttttttttttttgagaccgtgccttgctctgtcgcccaggctggagtgcagtggtgtgatctctgctcactgcaagctccgcacgaccccccaggttcactccattcttctgcctcagggtcccgagtaactgggactacaggcaccccccaccatgcctggctaatttttttgtatttttttttttagtacagacatggtttcaccgtgttagccaggatggtctccatctcctgacctcatgaaccacccaccttggcctcccaaagtgctgggattacaggcgtgagccacctcacccagcctttttgtagagacagggcttcatgttgcccaggttggtctcgaactcctggcctcaggtcatctgcccgcctcggcctcccaaagtgctgggattacaagggttagccaccatgcctagcctctacaaaaactttaaaaattggcgagatgtcatgcatacctgtagtcccaactaccaaggaagaaggatgatcacttgagcctggggcatcgaggctgcagtgagccatgattatgtcactgcactccagcctcggtgacagagtgagaccctctcaaaaaaagttgggacttggccggacacagtggctcacacctgtaatcccagcactttgggaggccaaggcgggtggatcacaaggtcaggagatggagaccatcctggctaacatggtgaatgaaaccccatctctagtaaaaatacaaaaaatttgccaggtgtggtggtgggcgcctgtagtcccagctactcgggaggctgaggcaaaaggatgacgtgaacccgggaggcggagcttgcagtgagctgagatcatgccattgcactccagcctgggtgatagcgagactctgtcccaaaaaaaaaaaaaaatgctgggactgaatttttgtctgttttggtcactgaaataccttctgtgcccaagacagttctggcatgtagtaggtacctgaaaaatacctgaataagagagtgagaaacaagaaacaggtgcagagaactgaagtcagtggcccaaggtcatgggggtaggaaaccacaaagctggggtttgaacctgggcagtacagcacctgagtctctccatctttttttttttttttttttaagacagagtcttgctctgtcacccaggttggagtgcagtggcttgatctcggctcactgcagcctctgccttccaggttcaagtgattctcatgcctcatcctctcgagcagctggaattacaggcatgcgccacgacgctgggcttttttttttttgagatggaatttcactcttgttgcccaggctggagtgcaatgatgcaatctcggcggctcaccacaacctctgcatcccagattcaagcgattctcctgcctcggcctcctgagtagctgggattacagggatgcgccatcacagaccccgggctaattttttttagtagagacagagtttcactatgttgcccaggttggtctcgaactcctggcctcaagtgatccgttcgccatgacctcccaaagtgctgggattacaggcatgagcccgtcccgtccctggctgtctctccatctttccatcttttttttttttttttttttttttggagatggagtctcactctgtcacccaggctggagtgcagtggcacgatcttggctcactgcaagctccgcctcctgggttcacatcattctcctgtctcagcctcccaaatagctgggactacaggcacttgccaccacgcctggctgattttttgtatttttagtagagacggggtttcaccgtgttagccagggtggtctcgatctcctgacctcgtgatccgcccaccttggcctctgggcgaggattacaggcgtgatccacctcacctggcctctccatctttttaactgcagtgtcagcggtgttccttgtcttctctgcagatgcaggcagcagaatatagtggttataggaacacaggtggaaaccctgtccaaagcaagggctatcgggtatcacctctgaccatccttcccattcatcctccaggtcaagtctggcaccatctttgacaacttcctcatcaccaacgatgaggcatacgctgaggagtttggcaacgagacgtggggcgtaacaaaggtgaggcctggtcctggtcctgatgtcgggggcgggcagggctggcagggggcaaggccctgaggtgtgtgctctgcctgcaggcagcagagaaacaaatgaaggacaaacaggacgaggagcagaggcttaaggaggaggaagaagacaagaaacgcaaagaggaggaggaggcagaggacaaggaggatgatgaggacaaagatgaggatgaggaggatgaggaggacaaggaggaagatgaggaggaagatgtccccggccaggccaaggacgagctgtagagaggcctgcctccagggctggactgaggcctgagcgctcctgccgcagagctggccgcgccaaataatgtctctgtgagactcgagaactttcatttttttccaggctggttcggatttggggtggattttggttttgttcccctcctccactctcccccaccccctccccgcccttttttttttttttttttaaactggtattttatctttgattctccttcagccctcacccctggttctcatctttcttgatcaacatcttttcttgcctctgtccccttctctcatctcttagctcccctccaacctggggggcagtggtgtggagaagccacaggcctgagatttcatctgctctccttcctggagcccagaggagggcagcagaagggggtggtgtctccaaccccccagcactgaggaagaacggggctcttctcatttcacccctccctttctcccctgcccccaggactgggccacttctgggtggggcagtgggtcccagattggctcacactgagaatgtaagaactacaaacaaaatttctattaaattaaattttgtgtctccctcctgtgtctccttctggggaaagacagacttaaggaaacccagcagtggtctttttggggggggggggggtttccagtatatctcctttttcagctattgctagagaggttgctgagtgttccacaagattccagggacccttatttaccccataaccctcaaaaccaacgggggaatggctgttgctgctgtaaatactccacatactaacttactgaatccttgaacctaactggtaagttttggttctgcttatttatttatttttaagatagactctcgctctgttgtccaggctggcgtacagtggctcaatctggttcaccctgccccttaaactggcctttttcatgcttctattcctttggggtcctgtggctcagcccaacccctctgggatgcctccaggactggtagatccaagggagaattctgtatttaatgtagtgaggctttgaaagttaacatctttaaatacttctggggtcagattaggtatagtacaacaaagtactcctgcccggagacccaagaatgaaaattgtaggttcattccaaaactccagatccctaaagaatgaatgaggctacaaaatggcaccttgcccccgcttccaacttaaggttttttttctgtgcttggtggcctttcaggtatttctagttttgagtaactttcactttgactgctctacaagggttcctgccaggatacccagaccagaataaaactcatttgggggccgggtacggtggttcacgcctgtaatcccagcactttgggaggccgaggcgggtggatcacctgaggtcaggagttttgagaccagcctggccaacacggtgaaacccaatacaaaaaattatccgggcgtggtggggggtgcctgtaatcccagttactcgggaggctgaggcaggagaattgcatgaacccggaaggcggaagctgcagtgagccgagatcgcgccactgcactccagcctgggtgacagagactgtttgaaagaaaaaattctcatttggaagaggcaaaatgaggtttttacagaagaaatacaaatgtctgtaaccagtacaggtacataaaaactttgttaaaaattcatttgagcgtgagagtggggacaccagagtcactttgcagccccgtgacgtcaccgataacgggcatggcgtcactcaggagaccacgtgtgcgggccgagcaagaagccccgcccacagcgcggagtttagtctgcgcgtgcctcgctcgagaacgcgctcgtgcgcatgcccacaaaggccaaggagggagtgcgcaggtcacgtgcgccggtggtcagcgcgcgcattgcctgccccggaagtggtcggcgcgcggcgcggcgcgcctgggcgctaagatggcggcggcgtgagttgcatgttgtgtgaggatcccggggccgccgcgtcgctcgggccccgccatggccgtcaccatcacgctcaaaacgctgcagcagcagaccttcaagatccgcatggagcctgacgagacggtgcgggccgggccggagcccgggggcgggagcgacgggtttcgggggtggggtgggggcggggaggctagaatcccaacgggaggggcagggaggacggcgcgggtcggccctgcccagacccccgacctgcccgactttcctggaccccccgatggtctttggcccagcccccagccgatcgggcggcgctcctgcgccggtctccgggcgaggccccacccccggggcgctggccaggccccggctccaatgtcagcgctctcgcggggcgcgggagtcacaagctcggattcctgggcaggccaagctctccaagactgggctccacgttcccagctttgcaggcgtctccttgggacactggtggtcgaatctaggagtaatgaccaggagatactgagtagtgacgacaacaacgatgttaatgataataaacgggtctcagtctttataattttggtggtccgtgtttgttggccgtttactttttatcagtcaccgagtgttgtagtgttgttttaccgctctgcaaaacgggcttgtcattggggacctctgatcattttacagatgtggaaacctagggattgaggaactttgccacagtcacacacaagtaatggcagagctgggattcaaattcggttctgcctcgtgtgagcgtccacgatataaatattatgctgcctttttagtcaaaagtagaattaggacctaattcaaacatactgaatgtctattgggtacttggcgctttttgcatagtgagggagacattgaagtccactttttgtagaaaaggaaacacacattttttgatccgctcaagtgtttggctttgggcaagttaacctgcctacctgtctgtgcctccgttttctcaaatatcaaatgaaccggtcgcctgctggcttccgcctgtaatcccagcacttagggaggcagagggaagaggagcccttgagcctaggaattcgagatcatcctggcaacacagtgagaccccgttctctacaaaaaaaagaaacaaaaatcaataaataaaatgagaccaattaaacgtatttcataggaaacttaaaaggtatgacacatatacatttacagtagcactattggccaggcacggtggctcatgcctctaatcctgatgatttgggaggcagaggcaggaggattgcttgaggccaggagtttgagaccagccagtctaacatagggagactcttatctacaaaaaaaaattatttttaattagtctggagtggtggtgtgtacctttagtcctagctactcccaaggctggacaagagtaccagttgagcccaggagtttgaggctgcagtcagcgatgatcgtgccacatcaatccagcatgggcggcagcgagatcctgcctcttaaaattaaaaaatatcactattaactattagtcacttattgtccaaggtagagtgtagagtgggggactgtcccctttattctgttaattatactttatactacccgaaattacattttcttcacattagtgttctctcattgagagcagggacttacttgtgttgagtttgttctgtgctgtggcctctgtgtctaaaacagcacctggcacataatgggtgtttagtataagtaaatactgtgttgaatggcatgatgattgaatgaattcaaatctagcatgctttagatgctgagaaagcttaaaaaacccagcgtgcttgcctttctgccatcagggctggcagtttctctgtcctaaactagaagggaaaagagaatcttggggtctccagtgactgtctgtaccactccctctaggtgaaggtgctaaaggagaagatagaagctgagaagggtcgtgatgccttccccgtggctggacagaaactcatctatgccggcaagatcttgagtgacgatgtccctatcagggactatcgcatcgatgagaagaactttgtggtcgtcatggtgaccaaggtgggtgacgtgtgctggctgggagggtgggtggacgagctggggagctggcaaagagcctgtgtgcccaggagagattagctgtgaacagggcggggccacagcggagcgggttgttgggtctgatagggttgctgatgccagctccctttttcttgctgttgcagaccaaagccggccagggtacctcagcacccccagaggcctcacccacagctgccccagagtcctctacatccttcccgcctgcccccacctcaggcatgtcccatcccccacctgccgccagagaggacaagagcccatcagaggaatccgcccccacgacgtccccagagtctgtgtcagggtaaggcgggggcagcagtcccagcttgggccctgtcctcctagcacattccagcgtccacataagtggtcccacacacctggagggagggcaagccgccagaagccagggtccgatttctctctcttgaatttgcagctctgttccctcttcaggtagcagcgggcgagaggaagacgcggcctccacgctaggtgggtgggtggtccccagggcagaggtgactgggtgccccagccatcagctgggccttgtctgggtgcgggagggcctgggagctgccctttcctcttcctggtgacctaggctttgctgcttcctccacagtgacgggctctgagtatgagacgatgctgacggagatcatgtccatgggctatgagcgagagcgggtcgtggccgccctgagagccagctacaacaacccccaccgagccgtggagtatctgctcacggtgaggtggggcttccgcctcccggggaggccttgagggagtacccgggcgtcactgccctgatgggcggttgggaaggcaaaacctgccctgaaaagcctttgggtagtgattctagccactaaaggcttcccacaggaggctggatgtgagtgatgggtgggcctctggagggcagggccgaggcctcatctgtgtcctgccagggcatggaggagggtggcagcaggaggtctgtgcattagaactaaacaggacccctgacagggaattcctgggagccccgagccggaacacggttctgtccaggagagccaggtatcggagcagccggccacggaagcaggtgggtgtgcacatgccgcatctgccctccaggtacctgactcacattacactccaccccgcagtgctcctaggagcccggcgtggtgtctgactgcaccccttcctactaccagcaggagagaaccccctggagttcctgcgggaccagccccagttccagaacatgcggcaggtgattcagcagaaccctgcgctgctgcccgccctgctccagcagctgggccaggagaaccctcagcttttacaggtgtggtcccaagggcagagggagctagggcagccaccatttcccttccctgtgggcaccagagtccataacacgtaggaatcgttctaggtccggaaagcaggactaagcacatgcttcccccacgcccctgtgcttcctgtgacctggtgacccccctggtttctcagtcttcccaaccaccttgtaaggtgtgggtgctgtcaacatcacctcccacagaagaagacaccggaaacttagagcagcctgtcattcccagggtcacgcagctggtagtgtgtgtgtctgcctcctgcctcggggtggggtcctgggctggggctctggcttcacatacagatggtgctgcgtaaatgtctgtaaggtggcatgacgtcacccaggacagctgtgccccagttggctctgggacaactctgctcagtgaggctccatcttgcccttgaaggttcacaggaagagtgggggagtggccccctgggtgcaagtaggttcctctgggttctcggtgaagtgcctaccggtcttggctcaggaccctgctgtctgacccttctcctctcacttctcagtcccttgccagctcctcctggtcggtcgtgttcttcatctgcactcagccctccctcatagtgtcctggggccttcagtctgtatgggaacccccaaatctatgtagccagcccaggcctctctgaatgccacactccatggctggcttaattaactctccatcaaagtgctccctagactagacgtctaagacttagaacagacctccccagtcctccccgatctctgcaaggattagcttggggttgcttcagccccaggccctggggatctgctggggtctaccccttgtcctgtctgctcttcccactcagcccctccctgcactccagctctctggtagcctcttcctgggcctctgccactgcatagtcccacagtccacttttcaaccatgaggcagatgactaaaaagcactttcttttctttttttttttgagaggaaatctcgctctgtcgcccaggctggagtgcaatggcgcaatcccggctcactgcaacctccgcctcccgggttcaagcgattcttttgcccccgcccgagtagctgggactacaggcgcccgccaccacgcctgactaattttttgtatttttagtagagatgggatttcaccctgttagccaggatggtctcaatctcctgacctaatgatctgcccgccttggcctcccaaagtgctgcaattacaggcatgagccatcacacctggctgactgaaaagcactttcttctttaatgtgaaaatgatcagatgcatacaatggtagagttatatcagagcttccagatacccaggtagggcacagtggctcatgcctgtaatcccagcactttgggaggctaaggcaggcagaccacttggtcaggagttttagaccagcctggccaacatggcaaaaactcgtctctactataaatacaaaaagtagctgagcatggcggcaggccactgtagtcccagctactcaggaggtggaggcaggagaatcgcttgaacccaggaggcagaaattacagtgaaccgagattgccccactgcactccagcctgggtgacagagtgagagtgtctcaaaaagaacagaaacaaaaatgaacaaatgaacttccagatacctaaatccaacacccagatgagttcactttttttggtttgggggctggtaggtgggaatagagacagggtctatgttgcccaggctggttttgaactcttgggcccaagcagtccctcctgccttgcctcccaaattgttgaggttacaggcgtgagccaccacacccggccaagttcacctttctaaaagatccacagaccacgtcttttcccatgtaactgtcaccaccgtggcttccccctgctctagaaaatgggtctgacttgggccttcctctctggtgtcattgtctgcctcctcccccttcccttgttcgctgttttttgttttttttgttgttgttgtttgtttgtttttgagatggagtttcgctcttgttgcccaggctggagtgcagtggcgtgatctcagctcaccgtaacctccgcctcctgggttcaagagattctcctgcctcagcccccagagtagctgggattacaggcatgtgccaccacgccctgctaattttatatttttagtagagatgggatttctccatgttggtcaggctgctctcaaactcctgacctcaagtgatctgcctgcctcagcctcccaaagtactgggattgcaggcatgaggcaccgtgcccagccccattcactctgttcctgcttctgtttctgagacttcccagatgcatccaccctgggcctttgcacttgctgtttgctttacctggaggaaaccctctgcatccgccatactgcaggcctctccaccagccctcatctgcagttccttcctagccagacacttgcagttgtctggttcatttattggctcactcacttattttttgagagtctcttgcccaggctggagtgcagtggcacagtctcggctccctgcaacctctgcctcctgtgttcaagtgattctcctaccttagccttcttgagtagatgggattacaggcacgtgccatcacacccagctaatttttgtattttagtagagacggagtttcaccatattggccaggctggtctcgaactccaggctggtctagaatcacctgaagtgattataggtgtgaaccactgcagccagcctatttatgtatttatttattcaagacagggtcttgctctgttgcccaggctggagttcagtggcttactgcagcctccgcctcctgggttcagtcttatgcctcagcctgccaagtagctgggattacaggcgtctgccaccacacctggctactttttgtattcttagtagagatgggggttcaccatgttggccaggctggactcgaactcctgacctcaagtgatccacctgcctctgcctcccaaagtgctgggattacaggtgtgagccaccgtgcccggcttatttcttggctcacttaaaagcacatcatcagctcttccagggtagggcttgtgtcgactgctatgttgtgtttggccagaacaggctcctctggatatttgcctgactgaatgaaaaagcaagggctgtgatgacctggggagaggaggggaccagggctgtgaattaccttcccttccccaccctctcctgcagcaaatcagccggcaccaggagcagttcatccagatgctgaacgagccccctggggagctggcggacatctcagatgtggagggggaggtgggcgccataggagaggaggccccgcagatgaactacatccaggtgacgccgcaggagaaagaagctatagagagggtaagaggcctggctgaggggtgactgcaggtgggcaggacccctaccctctcctgctcacacttaacctatcttcccacagttgaaggccctgggcttcccagagagcctggtcatccaggcctatttcgcgtgtgaaaaaaatgagaacttggctgccaacttcctcctgagtcagaactttgatgacgagtgatgccaggaagccaggccaccgaagcccccaccctacccttattccatgaaagttttataaaagaaaaaatatatatatattcatgtttatttaagaaatggaaaaaaaaatcaaaaatcttaaaaaaacaagcaaacagtccagcttcctgtcctcctaaagtggcccctgttcccatctcccgggccagacagctgtccccccgtcctcctccccagcccagcctgctcagagaagctggcaggactgggaggcgacagatgggcccctcttggcctctgtcccagctctctgcagccagacggaaaggcggctgcttgcctctccatcctccgaaaaacccctgaggacccccccccatcctcttctaggatgaggggaagctggagccccaactttgatcctccattggagtggcccaaatctttccatctagggcaagtcctgaaaggcccaaggccccctccccagtctggccttggcctccagcctggagaagggctaacatcagctcattgtcaaggccacccccaccccagaacagaaccgtgtctctgataaaggttttgaagtgaataaagttttaaaaactagccctatggtctgtgcctgctggggctccccgcgcccacctgtctgggtcttggggggctggctgggcacaggcaggcatggtgacgggtgcctggaagggggagaggagtctgtgagtccctgcagattgaggcttccggtgtctcctcccccagtgtgtcatttccaggcagtggaccccagcccaacgttacaaggactgcttctccccggcccccaccatcatcaccacagtctgttttggctatacttccccccccaccagccttgtaattggctaattactggagatgaatgttggtaaacagaagccttcttctcttctgccatctgcttctccattatttgcccattgtacaccccccttttcctcccactgaagccccagttagtcagcagggcctagagtccctgtccccttttgagtacagccaagtgggggattccccagctcttaagtattgggggaggaaccaggggacccagagaggcacaccttgagaggacgcagatctcttcaggggtactgccaggtagcaggctttattgggaagggacaaagcctcaggagctgggtgccccagaggctgctgggtcttgagccacagctgcagccaatgcagcagctcgcgcctccttcttccgtttctgtttttcctccttgaggcgcttgcgctccttcttctctaggtcctggagcagctcctggaagcgggcactccttgggtccacctggtagcccaggagctcctgggcctcagcctgcagtcgggccctcctctccttgtcagcctgggccttctcccagttctcccgctgctgctgctgccagttcacaatcatctgtggcatcttggccatgcactctgcgatgtgctgctccctgcaggggagggagagtgggctgtgacactggcactcagccagggcagagcccacccacccatatctcacccataggcctttgcccacgagcctgcctcctcaactcccccagtagattaactgtcaggaaaagcccttgacaagtgaagaaacaggaagagatgatgagaaagttacctgtgcatgaatttgatcacaagggcatgtcaagccccagtaaaccccaggtgccaaagccaaatcagcatttcactgagctgcctactgagcaagccaagtgccactcccatggataatttcacacctttatttcatagacattgctgagcacttcctgtacagaggccaggcccaattctaggcacaggagtgaaagcaagaaagacatttcccaccaatccttgagtttgtagctaccagtcacagccccatttttttcttttaagttcaggggtacaagtgcaggtttgttacgtaggtaaacttgtgtcatggggtttttttgtacagatttatttcatcactcaggtattaaacctagtacctagaggtcatttttcctgatcctctccctccaccctccaaaaagccctagtgtgtgttgctcccctgtgtgtccatgtgttctcatcatttagctcccacttacaagtgagaacacgttgtatttggttttctgttcctgtgttagtttgctagggatgatagcctccagctcccgtcgtgtccctgcaaaggacatgatctcgttcttttttatgacagcctcatttaaggattagaaaagtaaaagaattaagccctataatggtcatctggctgaggaggggcagaaacaggagtccctgctccatgattccctgcctgggtgatcagacgcatgacttcacttcaccaagcctcagtttcctcatctctaaaattagggcaatcccttcttcctcttaaggctattaggaaaacaagaagattaaacaccaggaacacacttgacctacccccttcacgctccaggatgtggcattatctataagagatgcccctggtctggcccgacgcggtggctcacgcctgtaatcctagcactttgggaggccgaggcagatggatcacctgaggtcaggagtttgagaccagcctggccaatatggcgaaaccccatctctactaaaaatacaaaaaatgagccgggtgtggtggtgggcgcttgtaatcccagctactcgggaggctgaagcaggagaatctcttgatcctgggaggcagaggttgcagtgagctgagattgcactccagcctgggcaacaagagcaaaactctgcctcaaaacaacaacaacaacaacaacaaaaagatgcccctggtccttcagacctgcctctgtatctgacctctgccctcttggttccaggacccatcaccttcctgccctcaccttttccccagccacactggcttcctggctgttctttaaggcatatcgtatctcagggcatttgccccagctgttccctttaccagaaactttctacccaagagatcgccccatagctaagtctggttattcaggtctttgcttaaacatcacctcctcagagaggcctgaggcttcccaaaccaaagctgccctcaggcacacactcttcactcttttaccttcctactagtcggctgtcaccattggtattatcttgcctgtcagctgtcgccatctgatattaagggcccttttggggcctgcctcggcctcccaaataactgggattacaggcacgagccaccgcccccggcctgggacagggtcttgcacacggtatgcgctcagtaaagacttggtggtgatggccggacgtgatggctcacacctgtaatcccggcactttgggaggctgaggcaggtggatcacttgaagtaaggagtttgagaccagcctggccaacatggtggaaccccgtctctactaaaactacaaaaatttgccgggcgtggtggtgcacgcctgtaatcccagctacaccggaggctaaggcgggagaatcgcttgaaccggggaggcggaggttgcagtgagccaagatcttgcgactgcactccagcctgggcaacagagcgagactcttgtctccaaaaaacaaacaaacaaacaaacaaaacttgctgatgaatgactaaatggacgttattctgagtttgttttgcggccaggtgagcgtatacataaatctacaacatgcagatgctgcgacgtgaccccgaaggggtaggcacggtttggggcccagttcgcccacggggcacagagggcagccccgcgtctgcctgcacgcacgcacctctcccgacgcttctgctcttcggccagctgcttcacccgcagcgactcctgcatggtcgccaggctcgggtaccattcgcgttcttcggcctccagctcccgcagctgctccggcgacggccataacgaaccggggaccaccccggaggcggcgccgtaacgcgcgaactgcttagccgcgtagcgcggtcccagctgccaccgcggggtcaggaggtcctcggggtctggccaccggggtcccggcctgcggcgcgggggcggccgcgcccggtagccacgggaacccggggccagggtcgccgccacacctagtaggctgcgtgcctgtcgcacggacgccgccatcttggctgtgcggggtcctcacaggcccgccgggctgtccatgcccggtgcctgagcgcgaggcccggtgtgggccagggcagggcgaggggtgtccctgctgcctcagttcgggggagggcggcgaaggggatagtatgggttttatacgtttccaagtataactttaaattttagttaagcagttactgattaaagtcatttttaattttcactttttttcttctcctttctgcacactgacacttaaaaatacatatttttgtcgggcgcggtggctcacgcctgtaatctcagcactttgggaggccgaggcgggcggatcacctgaggtcgcgagttcgagaccagtcttttttttttttttttttcgagacagagtctcgctctgtcgcccaggctggagggtaacggcgtgatctcgggtcactgtaacctccgccttccgggaggagaggagaaaccccgtctctactaaaaatacaaaattagccgggcatggtggcgcatgcctgtagtcccagctccgcgggaggctgaggcaggagaatcgcttgaacccgggaggcggaggttggggtgggccgagatcgtgccattgcattccagcctgggtaacaagagcgaaactccgtctaaaaaattaataaataaaaataaatacatacatgcatacacacacacacacatatacatatatatatacgctcacctggctacaaatatatatttgtgtatttttttctaagtgttcagtgttctttgggtaaaaattgtatttttgttttttgcatatcagaaaccatactgttttattcatccatgtgtcttctgtgcacacagtagccctccaatgaataatctgaaatcatgttgaatgaacacattgaaaaatcaaaaataagaggctgtggcagggccactgatatggtttggctctgtgtccccaaccaaatctcatcctgaattataatccccatgtgtccagggagggacctgtaatccccacatgtcggggaagggaggtggttggatcacgggggtggtttcccccatgctattcttttttttttttttttgccttcaaaaagtttattttattttattttattattattatactttaagttttagggtacttgtgcacaacgtgcaggtttgttacatatgtatacatgtgccatgttggtgtgctgcacccattaactcgtcatttagcattaggtatatctcctaatgctatccctcccccctccccccaccccacaacagtccccggtgtgtgatgttccctttcctgtgtccatgtggtctcattgttcacttcccacctatgagtgagaacatgcggtgtttggttttttgtccttgcgatagtttgctgagaatgatggtttccagtttcatccatgtccctacaaaggacacgaactcatcattttttatggctgcgtaaaaattatatttttaactttacttttatacatttaaactagcatttattaggctgggcttggtggctcacgcctgtaatcccagtactttgggaggctgaagcgggcggatcacttgaggtcaggagttggagaccagcctgaccaacatggcaaaaccttgtctctactaaaaatacaaaaattacctgggcgtggtggtgggcgcctgtaatcccaactactcaggaggctgaggcaggagaatcgcttgaacctgggaggtggaggttgcaatgagctgagatcgtgccattgcactctacccagggtgacagagtgagactctgtctgaacaaacaaacagacaaaaagcccactagcatttattatttttttaatgtaaatgtggctgaacgcggtggttcacacctgtaatcccagcactttgggaggctgaggcaggtatcactgaggtcaggagttcgagaccagcctggccaacatggtgaaaccccgtctttactaaaaatacaaaaattggctgggtgcggtggtgcacacctgtaatcccaactactcgagaagctaaggcaggagaatcgcttgaacccgggaggcggaggttgcagtgagctgagattacaccactgctctccagcctgggcaacagatcgagactctgtctcaaaataaataaataaataaataaataattctgtcacatgctgtgacatggatgaaccttgaggacattaggctaagtgaaagaagccagtcacaaaaggacaaatattgtatgattccacttatatgaggtaactagagtagtcaaattcatagagacagaaagtagattaggagttccaggggttgggggtggaggagtgggagttattgcttataatgtataatatattttatattgtaaaatatacaaaataaataaaacgaatttgtgttttgttttgttttgagtcagagtctcgctctgtctcccaggtgagagtacagtgatgcaatcttggctcactgcaacctctgcctcccagattcaagggattttcgagcctctgcctcctaagtagctgggaccacaggcgcaagccaccaagcctggctgattttcatattttactagagacggggtttcaccacgttggtaaggctggtctcaaactcctgaccttaagtgatctgcccacttcagcctcccaaagtgctaggattacaggtgtgagccaccatgactggccacgttttttttgtttttttttttttgtttgtttgtttttgagatggagtttagctctgttgcccaggctggagtgcagtggtgcgatctccgctcactgcaagctccgcctccggggttcacgccattctcctgcctcagcctcccgagtagctgggactacaggcgcccgccaccacgcccggctaatttttttgcatttttagtagagagggggtttcaccgtgttagccaggatggtctcgatcgcctgaccttgtgatccacccgcctcggcctcccaaagtgctgggattacaggcatgagccaccgcgcctggcctgttgtttttgtttttaatcacacacgcacaccttctctacccccgcaaaaaataactgcagttttctcaagacatgaatgttcatagcaacaccacatatatatgtcattaccaagctggaaatagctcacacccaatgtccatctgaagtagaatggacacctaaattatgctgtttcagccaatggaatactacacaggaatgaaagagcaaatattacatcttctcacagaagatggatgatgcttataagcataatgtgcaacaaaggaagaggacctatatgattgctttttaaattttatttttttgagacagggtattgctctgttgcccaggctagagtgccctggctcggtcatagctcactgcagccttgaattcctgggctcaagcaatcctcccgcctcagtctcttcagtagcaagactataggcatgaaccgctactcccacctacattttaaatttttttgtagagacggggtttctctatgttacccaggttggtcttgaactcctggctcacctcccctcccctcccctcctttcttgacagggtctcactgttgcccaggctggagtacactggcatatcactgcagcctcaatctcctggtctcaagtggtcctcccacctcgggctcctaagtagctggaacttcaggcactcaccatcaagcctggctaatttttgtattatttgtagagatagagtctcaatatgttgcccagggtggtcctgaattctgggacccaagttatcctcccaccttggcctcccaaaatgttggaattacaggtatgagctaccatgcctgacctcagaattttttcatcttgcaaacctgtaactctatacactcactccccagtttccctttcgcccagtccctggcagtcactattccttttttttttttttttttgagacggatggagtctcgctccgttgcccaggctggagtgcagtggcgcgatctcggctcactgcaagctccgcctcccgggttcacgccattctcctgcctcagcctcccgagtagctgggactccaggcacccgccaccacacccggctaatttgtttgtatttttggtagagacagggtttcaccgtgttagccaggatggtctcgatcccctgacctcgcgatctgcccgtctcggcctcccaaagtgctgggattacaggcgtgagccaccgcgcccggcctggcagtcactattctaccttgtttctatgaatttgactactctaggtacctcatataagtcgaatcatacggtacttgtccttttgtaactggcttattttttattttgagacagagtcttgctctgttgtccaggctgaagtgcagtggcacaattattataactggctgcagaatcgacctcctggactcaagtgatactcccacctcagcctctcaagtagctgaaactacaggtgctcacctggctaattttttttttttttttttttttgagacagggtttcgctctgtcgcccaagctagagtgcaggggcgccatctcggctcactacaagctccgccgcccgggttcacgccattcttctgcctcagcctcccgagtagctgggactacaggcgcccgccaccacgcccggctaattttttgtatttttagtagagacggggtttcaccatgttagccaggttggtctcgatctcctgacctcgtgatcctcctgcctcggcctcccaaagtgctgggattacaggcgtgagccaccacacctggcctttttttttttttttttgagacagagtacttactctgttgcccaggctggagcgcagtggcatgatctcggctcactgcaacctctgcctcccaggctcaagcaattctcatgcctcagccacctgagtagctgggactacaggtgtaaaccactgcacctggggctggctgattttaattagtataatatcctaaaatttctttctttctttctttctttctttctttctttctttctttctgtctgtctgtctgtctgtctttctttctgtctgtctttctttctttctttctgtctttctttctttctttctctttctttctttccttctcttctcttctctccttccttccttcctttctttctttccttccttcctttctctttctttcgacattctctctctatcgcccaggctggagtgcagtggcactgtcttggatcactgcaacccccacctccccggttcaagcaattcttgtgcctcagcctcccgagtagctgggattacaggtgcccgccaccacacctggctaatttttgtatttttcgaggtttcaccatgttggccaggctgatctcaaactcctgacctcaagtgatctgcccacctcagcctcccaaagtgctgggattacaggtgtgagccaccgtgcttggcatatcctaaagtttcatccatgttgtagcacgtgtccgaatttctttttttcttttttttgtatttttagtagagacggggtttccccgcattagccaggatggtctcaatctcctgacctcatgatccgcccgcctcagcctcccaaagtgctgggattacaggcttgagccaccgcacccggccaacgtgtcagtatttctttcctagcctgggcaacactgtgaaaccctgtctctccaaaaaatacaaaaattagctggctatggtggtgcatccctgtagtccctcctacttgggaggctgaggtgggaggtcaattgagcctgggcggtgaagtctgcagtgagctgtgagtatgtcagtgcactccagactgggtgacagagcgagactgtctcaaaaaaaattttttttttcctttttaaggctgaatgctattccattgtatgaatggaccacattttttttttcccaattgcagatgtcaggctgaaagaatggaccacattttaggctgggcacgatggctcatgcctgtaatcccagcactttgggaggccgaggcaggcggattacaaggtcaggagttcgagaacagcctgtggtgaaacgctgtctctactaaaaagacaaaaattagccgagcgtggtggtgcgtgcctgtaatcccagctactcaggaggctgaggcaggagaatcgcctgaacccaggaggtggaggttgcagtgagccaagatagcgccactgcactctagcctgtgtgacagagtgagacttcgtctcgaaaaaaaagaaaaaaaaagcggccaggcacggtggctcacgcctgtaatcccagcactttgggaggccgagacaggcagatcatgaggtcaggagatcgagatcatcctggctaacatggcgaaaccccgtctccactaaaaatacaaaaaattagccgggcgtggtggcaggcacctgtagtcccagctactcgggaggctgagacaggagaatggcgtgaacctgggaggcggagcttgcagtgagccgagattgcaccactgcactccagcctgggcaactgagcgagactccgtctccaaaagaaaaaaaaaaaagaatggtctacattttgtttatccatttatctgtacgtggacatttgagctgtctccaatttttgcctattgtgaataatgatcttatgaacatgggtgtacagcatttcttcttcttcttctccttcttctccttctccttcttcttctctttctccttctccttcttgttcttctccttcttcttctttcttctttcttcttctttttatgagacagaatcttactgtgtcatccaggctggagtgcagtggcacgatcttggctcacagcaacctctgctaggttcaagcgattctcttgcctcagcttcccaagtaactgggagtacgaccgggcacagtggctcacgcctgtaaccccagcactttgggaggccaaggtgggtggatcacctgagatcaggagtgtgcaccaccacgccgagctaatttttttttgtatttttagtagagatgagatttcgccatgttggccaggctggtctcaaactcctggcctcaagtgatctgcccacctccacctcccgaagtgctgaggcttttattctttttttccccgctgagacagagtcttgctctgtcatccaggctggagtgtagtggtgcaatctcaagtcactgcaacctctgcctcccaggttgaagcaattctcctgcctcagcctccggagtaactgggattacaggcacacgccaccacgcccagataatttttgtattgttagtagagacagggtttcaccatgttggccaggctggtcttgaactcttgacctggtgatccacctgcattggcctcctagagtgctaggattacaggcgtgagccactgtgaccagcctggtttttattcctttttttttgtttgtttgttttttgagatggagtctcgctctgtcacccagactggagtgcagtggtgcaatctcagctcactgcaagctctgcctccctggttcacgccattcttctgcctcagcctcccaagtagctgggactacaggtgcccaccaccacacctggctaatttttttttttttttttagtagagacggggtttcaccgtgttagccaggatggtctcgttctcctgacttcgtgatccacccaccttggcctcccaaagtgctgggattacaggcgtgagccactgtgcccatcctcaggtgtttattcttagtgaaataaagtagcatagaatcaaattaccagattgtttctagtaattactgtcacactgtgggcctcctcctgaggcttttttctgagggagatgagagccatggaaggttctcatcacagggaccagtcttgactcaggtgctcacaggcgccctctggccgctgtggggggaataaactgtggggggccggtggccagggcgggaactgggagacctggaaggaagcgactgcactgatccaggtagggggacaaggagtgggtgagaagcgggcggattctgggtagattctggagctgaccggagttactgtcatataagattgggggcggggatgggtgttagagaaagagataggtcaaaggtgctctccaaagtttggagccttagcacctggcaggacagagctgcctttaactgtgtctagaggacagcagaagggcaggttgggggacagtcaggagctgggatgtagcagagctgggtgggaagcacgcccgcccctccaggcttggcctctgggaggcgggtgtcctgggcgcggccgccgcacagtcccgggagccgccgccagagggcgagcacgccgcatcgcactcgcagctccgtggaggggagggcgcgggaaaggctggcctggtctcttcccacggccccccggcctccaagctcctcacctgggtgcgagatagaggtgccaggatccagccaggaccccccagacacctccggggccccaaagcctgggatacgactctcaccctctttatctgcttctaacactcccaacctccacccccacaccaagctgttcccaccgcctccagcgccatctcaggtgtctgtaaaaatgccacctactcggggaggccttccctgaccaccctggagacagaagcccccgccctgacgcctctaaggaacatcccattttagcagcttcttaatcaagactgtgaaatgatctttattattattattattaatatttttgagaaggtctcactctgtcactcaggctggagtgcagtggtgtgatctggctcactgcaaccttcgcctcccgagttcaagcaattcttctgcctcagcctccagaggtagctggggttacaggctcatgccaccacgcccggctaatttttttttttgagacgcagttttactcttgtccaggctggagttcaatggtgtgatctcggctcatcgcaacctccgcctcccgggttcaagcgattctcctgcctcagcctcccgagtagctgggattataggcatgtgccaccatgcctggctaattttgtatttttagtacggacggggtttctccatgttggtcagactggtctcgaactcctgacctcagttgatccacccgcctcagcctcccaaagtgctgggattacaggtgtgagccaccacgcccagccttgcccggctaatttttgtattttttagtagagatggggtttcgctatattgtccaggcctcaagttatctgccctcctcggcctcccaaagtgctcggattacaggcatgagccactgcgtgcggccccttaattatcttttattgtctgttttctgcaccgtgtaaaatccatggcattttctgtcttgtcctcctgtatcaccagggctcaggattaagtctggcctatactgagtgttaaaggaaaaaaaaaaaaaaaacagctgggcaaggtggcatgtgcctttaatcccagcactttgggaggctgaggcaggaggatcacttgaagccagcagtttgagacaaacctggtaacatagtaagatcccgtctctgtgaaaatttaaaaatcagccaggccgggtgcggtggctcacgcctgtaatcccagcactttgggaggctgaggcgggcagatcatgaggtcaggagatcaagaccatcctggctaacacggtgaaaccccatctctactaaaaatacaaaaaattagccgggtgtggtggtgggcgcctgtagtcccagctactcgggaggctgaggcaggagaatggtgtgaacccgggaggcagagcttgcagtgagccaagatcgctccactgcactccagcctgggcgacagagcgagtctccgtctcagaaaaaaaaaaaaaaaaaaaaaaatcagccaggcatggtgttgtgtacctgtagtctcagctattcggtgggtttgaaacaggaggattccttgagtctaggaggttgaggctgcagtgagatgcaattgtgggactgcatgccaacctgggtgacagaacaagaccctgttaaaaaaaaaaaaaagccaggtgcggtggcttacacctgtaactccagcactttgggaggccaagacgggcagactgcctgacctcaggagttcaagactaccctgggcaacatggggaaactccatttctactaaaaaaaaaaaaaaaaaaaaattagccaggcatggtggcaggggcctgtagtcccaactactcgggaggctgaggcaggagaattgcttgaacccagaaggcggaggttgcagtaagctgagatcacaccactgcactccagcctgggggtgacagagggagactgtctcaaagaaaaaaaaaagaagaagagaaaaacaagtcaggcaagatagcttcctgtgcctatattcccagcattttgagacctgcttttcaagaccagcctgggcaacatagtaagaccctgtgtcaaataaaaaaataataaaataaaaagaactggcagggcatggtggctcatgcctgtaatcccagcactttgggaggctgaggtgggcggatcgcttgaagtcaggagttcgagaccagcctggccaacatagtctctactacaaatacaaacattagctgggcatagttgttcacatctgtaatcccagctacttggggggctgaggcaggagaatcacttgaccccaggaggcagaggttgcagtgagacgagacacagtgagactctgtctaaaaaaaaaaaaaaaaaaaaaagaacacaaaaacccagcaacaataatgttactcagagctgattcatggtgttactgtgtaggaacctctgttttaagctccttacataaattacctccttgagtcctcagaataacccaatgagatagggactgttttatcttcatattacagaagaagaaggtagggaccaggatggttaagggatttactcaaggttgcacagccaggaaattgcaatgcctaggccgaacccaagaaacctggctgcaaggtatgctagtttttaattttttttgagacagagtctcactctgttgcccagtctggagtgcagtggcgcgatcttggctcactacaacctccgcctcccgggttcaagcgattctcctgcctcagcctcctgagtagctgggattacaggcatgtgacaccacgcctggctactttttgtatttttagtagagacggggtttcacttatgttggccaggctggtcttgaactcctgacctcaggtgatctgcccgcctgagcctgccaaagtgctaggattacaggtgtgagccaccgtgcctggccataatttttgtatttttattttatttattttttaattttttttgagacagagtctcactcttgtcgtccaggctggagtgcagtggcgcgatcttggctcactgcaagctccgcctcctgggttcaagcgattctcctgcctcagcctcctgagtagctgggattacaggtgcccaccaccacgttcagctaattttttttgtatttttagtagagacggggtttcaccatgttggtcaggctggtctcaaactcctgacctcgtgatctgcccgcttcggcctcccaaagtgctgggattacaggcgtgagccacctcaactggcgaattttttttttttttttgagacggagtctcggtctattgcccaggttggagtgcagtggcgtgatctccgctcactgcaagctccgccttctgggttcaggccattctcctgcctcagcctcccgagtagctgggactacgggcgcccaccaccacgcccggctaattttttgtatgtttagtagagatggggtttcaccatgttagccaggatggtctcaatctccggacctcgtgatctgcccacctcagcctcccaaagtgctgggattacaggcgtgagccaccgtgcctggccaatttttgtatttttaaagtagagatgaggtctcaccatgttgaccaggctggtcttgaattcctgacgtcaggtgatcctcccgtctcggcctcccaaagtgctgggattacaggtgtgagccactgagcctcacccaaagtgtgcttttgctaattggagaatcggggtcccaggactggaaatgcagctgcccagggtcttcagacattgtgtgtctcggcccctggccccagacctgtctttcctggtccccacagctcgcacacagcaggaccagcccccatgtctctcagcaagttgggaggaggtgtgggaacccagctggtctgaatttactctcctcccccgctgtgggtctacagaaatgcctcccaggctatccaggaggggccaagagattaaaagcaggttcagaaggctcagatgccactcaccagacagcagggtcgactgctagtgaccttgagcccagtccggacagacagacaggcagacagacgcacggacaagcagatgctccttggccagctatccactcttctgtgcctgcttagcggggccctgcctacaggctcagggaggcctgaaccccagtctcctcgacctcagtcctgggctgcagccaatcagacctgggctctgggcccaggggccctgcccccactggtgccagcttctgcccttgggagctggaaggccttcttgggcctgcagaaagccaggcagctggggatgggcaggctgcagcgtgggcaagacgaggtggctgctgtgactctgccgctgaaccctcaggaagtgatccaggggatgtgtaaggctgtgcccttcgttcaggtgagtgggtgggtgtggggaggagagggctgggtctcaccattggcagaaggcacaggctgtggcccaagaaagatttgggttcaagtcctgtatcctccacctgaatgtctcggtgcctcagtttcctcccttgtaaaatgcgacccaagcctcctctatcctggtctccttgattccactatcatgcccctctccaccccccagtctatttttccactcagcagccagagggtgcctgtgaacaccagagtcagatctggttccccctccccctagaaccttgcatggctcccactttactcagaacaaaagcccaagtcctcttcacagcccacaaatttctgtactctctgatcctgttacctccctgatttcacctcctcccactctccccctcagttactttgcttctacacatcagcctccttttcctcagacaccaactttctttctgtttttttagacacgggagtctcgctatgttgcccaagctagtcttgagcttctggcctcaagcaatcctcccacctcagcctcctgagttctaggtgtgagcccgtctcttgcttgatataccaactttctttcttttctttctttctttctttttctctttctttctttcttttctttctttgtttttctttttttctctttctttctttctttctttcctttctttctttcttttctctctctctctttctttttttgagacagtctcactctgtcacccagactagagggcagcagtacaatctcggctcactgcaacctccacttcctgggctcaagtgattctcgtgcctcagcctcccaagtaattgagattacagatgtgcactaccatgtccggctaaattttgtactttttgtagagacgtggtttggccatgttggccaggctggtctcgaactcctgacctcaggtgacccgcctgcctcggccccccaagtgctgggattacaggcgtgagccactgcgccaggccaatgagaagtctcttatgaggaagatggctcaggatttaagcagagaaggaccaggatttgggggagagatgatagatccacttggaggggatcataggaggaactaacatgcattgagcacctactttgtgccaggcagtgggctaagggctttctgttggatgcttccgggctcctgtgatactgctgtcccttccccctagggtgctagttggcttcctactggtaccatcatcaggccatcttatcatcatatcctgcttggcttttctttacttttcttttcttattatttattttattttattttatttttgagatagagtctcgctctgctgcccaggctgcagtgcaatggcgcgatctcagctcactgcaacctccgcctcccgggttcaagcgattctcctgccttagccttccgagtagctggttttacaagcacacgccaccatgcccagctaatttttgtatttttagtagagacgggctttcaccatgttggtcaggctggtctcaaactcctgacctcatgatccacctgcctcggcctccccaagtgctgagattacaggcatgagccactgcacccggccttctttacttttcttttcaggtttttgttttttgagacagagtctcactctgtcgcctaggctggagtacagtggtgcaatctcggctcactgcacctccatctcccgggttcaagcaattctcctgcctcagcctcccgagtagctgggaccacgggcgcctgccaccatgctcagctaatttctgtatttttagtagaggcggggtttcactatgttggccaggatggtcttgaattcctgacctcaaatgatccacccacctcagcctcccaaagtgccaggattacaggcgtgagccaccacacccggccttttcatgttttttgttagagacagggtcttactctgtcacccaggctggagtacagtggtgcgatcatagctcactgcagatttgaattcctaggatcaagcaatcctcctgcctcagccttctgagtagctaggcctacagacgcacagcattagcccagctaatattttttttttttttttttgagacggagtctcgctctgtcgcccaggctggagtgcggtggtgggatctcggctcactgcaagctccgcctcctgggttcacgccactctcctgcctcagcctcccaagtagctgggaccacaggcgcccaccaccacgcctggctaatttttttgtatttttagtagagacggggtttcaccatattagccaggatggtctcgatctcctgacttcgtgatctgcctgcgttggcctcccaaagtgctgggattataggcatgagccaccgtgcctggctagctcagctaattttttttttttaatttctttgtagagacagggtcttactatattgcccaggctggtctcaagccaccacatcccgcccttggcttttaactccgaggtaaccaattccctgaattagtcctctttgttgaaaggcctaaagtgatttcttctttttctcatttaattaatttatttgtttatttatttcggagacagagtctcgctctgttacccaggctagagtgcaatcatgatctcaacttgctgcaaccttcacctcccaggttcaagcaattcttccacctcagcctcccatgtaactgggattacaggtgtaggtgcccatgcccggctaagttttgtattttcagtagagatggggtttcgccatattggccaagctggtctcaaactcctggcctgaagtgatccgcccacctcagcctcccaaaatgctgggattacaggcttgagccaccacacctggctgtctttgttgaatttcttttcttttttttttttttttttttgagacggagtctcgctctgtccccaggctggagtgcagtggcgctatctcggctcactacaagctccgcctcctgggttcacaccattcttctgcctcagtctcccgagtagctgggactacaggcgcccaccaccacgcccggctcattttttgtatttttagtagagacggggtttcaccgtgttggccaggatggtctcgatctgctgacctcgtgatccgcccgccttggcctcccaaagtgctgggattacaggcgtgagccaccgcgcccggcccttgttgaatttcaatgattttccaggtgaggaaacaaaagctcagagaggctaagtaatttgccccatgtctcagccaagagacagcagagtcaggatttgaacccaggcagcctggctgcagcatccatgcctgtcaaggtggggtggaagtggacaggtgattatcctcgccactctggccccaaactccgccaccctgaccgtctccatgcctccggccccaggtgttctcccggcccggctgctcagccatacgcctccgaaatcatctgtgctttggtcattgctcctctctctacatccctggctcggaccccaccccactagtcctgtgcaacagctgtatgcctgctcgcaagcgttgggcacccgtggtcctgtggtgtctcactggcagctcagcctcccgtcgacgggtgaagatatccaccatgctgatcgaggggtgtcactgcagcccaaaagcatgaactgagcatcgtggatgggtgcacggagacacgcaccttggagaaatgaggggagatggaccaagaaagacgtggacctggatgatgtactctgggtcaagagaccagggatgcagggttaggcagacaggtccccagagtcctcaccctgctccccagacagtagacacagtgcccgtcctggagttgcaccactgatagtcacagcacacaatgattgacaactcactttttttttttttttttgagatggagtctcgctctgtcgcccaggctggagtgcagtggcgcaatctcagctcactgcaagctccacctcccgggtttatgccattctcctgtctcagcctcccgagtagctgggactacaggcacccgccaacacgcccggctaattttttgtatttttagtaaagacagggtttcaccgtgttagccaggatggtctctatctcctgacctcgtgatctgcctgccttggccttattattttttttttttaaggacagagtctctctctgtcacccaggctggagtgcaatggcgcgatcttggctcactgtaacttccacttgccaggctcaagcagttctcctgcctcagcctcctgagtagctgggactacaggcacccgccaccatgcccagctaatttttgtatttttagtagagacagagtttcaccatattagcctggctggtctcaaactcctggcctcaggtgatctgcccacctcggcctcccaaagtgctgggatcaaatccactgttaatcattaggctgaactgtctcttatagaatgaggtcaaagacactcccagttgcagggagggtagatggccccacccagaccgagagacacagtgatgacctcagcctagggacaccaaaaaagaaaaaaaaaaaaacccaaaccaaaaacgcaaaccaaagcaggcaggcagacagctgctgggggaaatcctggggtccttgagacagaggcaggaccctcgtgttcccagctgcctcttgccttgatagtggtgctgtgtccctctcagaccccccacctgagtctccacagagccccacgcctggcatggcattccacagaaaccataaaggttggctgagtccagctgtctatatgtgcatctgtttgttcctccaactggggttccctgggagtgggtggccccatgacagggtgtgggcatctgagtgctccctccccagctggggctcagggtcttcagcgggcgagggcggcctggctttgggcggctggaaccagggccctggcagatgggcctgtctggcacagacgcagggacatgtggcgttgtcagtgttgcctccaaatgccccccggagcgtggggcggggagccggccaggcccttctcagccctcttcctgcctcaggaaggaaggcctcaggtgaggggagcaggaggggacccgaggaaacagatgggccagtggggcgtgggagcctgagacccctgacctcacaggcctcacagagagatgggaacgggacaggcaggcagctcccaaggccccttgctcgaagggccctggaggggagggtcatgaagggctctgggggggctgccccatccctgttccctccagagttctgtgccaaaccccaggcagtgtccgagtgggcagctcagccctggcaccatgggcaagcccccctctggtgggcatgaggcatttgccttccctccctctgctgtgcccacctcctgccagccaggggagccagctgggaaccttggtgccaggggagcccccagagtccctgtcccctcccgggcagtgccagccggcccctgccccgcccccccaggcccagtaatgggtgggtaatgagtgctgggggagcgggggaggggcaggggatgcaggtgccacaggcgctggcacgggggccgctaatcaggtttgccaacgccatctgtcaccgcacgagcatctggggctcaaggtgaccctgtcaccctcagttacaattatgagtttggcatctgtattaaagcccgccagccggccaggcgggggacggctggggtgggcacggggttgcacggtgaaccccatccctggggtacccttcccaggggctgcgtggctgccaggcgtggagcttcttaggggactatgtctgtgtgtgtatgtgtgtgtgtgtgcacacccatcccagtctccacaattcttaaagtgtgtccgggtgcagggctggaaatcataggtttgtgtgtgtctccatggtggctgtgtgtctaggagtttggtgggctggctgggggcggagctctgagattttgtgggtgcacagatgttcgtgcatctgcatgctgggacaagaacgtatggaggagggtgtctctttggatgatggtgtgtctttttcttttattagtagtattaattattattcttatttgagtcagggtctcgccctgtcacccaggctggagtgatcatggcccgatccctgcagcctcaaactcctgggctcaagtgatcctccctcctcagcctcccgagtagctggggctacaggctcatgacaccacgcccagctaattttgtttatttttttgtagagacagggtctcactgtgttgcccaggctggtctcgaactcctgggctcaagccatccttctggtttggccttccaaagtgctgggattataggcgtgagccaccacacccaacctgatggggtgtgtgtgtgtgtgtgtgtgtgtgtgtaaatgcacaggggtaggttgggaggggtatcagctttgggagaggccatgtgcagtactgctgagctcctcagctatccctttgtttctatcttcgccaactcctgctacgtggctgtgatctggagggctctgaggacggcttaagaatctggattttggctgggtgaggagtctcacgcctgtaatcccagcactttgggaggccaaggcaggtggattcattgagctcacaagttcgcaaccagcctggccaaaatggcagaactatgtctccacaaaaatatattaaaaattagctgggcgccgggcgtggtgactcatgcctgtaatctcagtactttgggaggctgaggcgggtggatgacctgagatcaggtgttcaagaccagcctggccaacatggcgaaaccccgtctctactaaaaatataaaaattagccaggcgtggtggcgcgtgcctgtaatcccagctacttgggaggctgagacaggagaatcgcttgaacccaggaggcggaggttgcagtgagccaagatggcgacactgcactccaggctgggcgacaaagcaagactccatctcaaaaaaaaaaaaaaaaaaaattagctgggcatggtggtgtgtacctggaaccccagctactcaggaggctgaggtgggagaatggcttgagcctgggaggcagaggttgcagtgagccaaggttgtgccactgctttccagcctgggtgatagagccagaccttgtctcaaaaaaaaaaaaaaaaaagaaagaaagctctcaattttgtaaggtagcctttggattctaaattcttggagctagattctgggtctggtggattctagttttgagcaataggatctagatttttggaatctgaatcccggagtatggtttcagtggcaccatcatagttcactgcaacctcagacatgtgccactacacccagctaatttttaagttttttgtagagataaagtcttgctatgttgcctatcgtgtcccaaactcctggcatcaagtgatcctcacgccttggcctcccaaaatgctgagattatagctgtgagccaccacgcctggctgagttcgtggatctggagtatagatcttggtatgattggaatcttttttttttttttttgagatggagtctcactctgttgcccaggctggagggcagtggcgcaatctcagctcactgcaagctccgcctcccaggttcaagcgattctcctgcctcagcctcctgagtagctgggattacaggtgcccactaccacacccagctaatttttatatttttagtagagacggggtttcgccatgttggtcaggctggtctcgaacccctgacctcaagtgatctgcctgccttggcctcccaaagtgctgggattacaggcatgagccaccgtgcccagcccggtatgattggactctagatgctgatcctgggtcctgggatctggattaccggctcttagttctgtatctgcgttcctgcttctggacttcagtctctgggcctgtgtgctctgtgtcctctctgtccacagctccaagttcagcaactgggcggctgcctgtcgtccctccatggatgggtgcagagaccacctatggccaccaggggacacccttggtctacatttggtccaagctgcccgactggaggaggagtctgggaccactgtggcccagttggactcagccctttcaggaggaccaggggctggacatcactttcccccacttccatcccagtctctgctgggacctgaaatctgtcagcccccactgactcaaacgtggagaactggactgagcacccccacagtgttctgaacagtaccgtgggacaaggtgcctgcccagtgagtaggtcagacccagggttgaagccatgtgtgtccatgagggtgacaatgagtgtctgaaaacgtgtccaggtgtgaaggcgagggtgcaccattcatcaggagtggccacatatgacagcattgctaagaagtgtgagcctgggaggcgcggtggctcaggcctgttgtcctggcgcataagaaagtgaggcccaaggccgggcgggcggatcacgaagtcaggagttcgagaccagcctgaccaacatagtgaaaccccgtctctactaaaaatacaaaaattagcctgtcgtggtggcgcgtgcctgtaatcccagctacttgggaggctgaggtatgagaattgcttgaacccagaaggcgaaggttgcagtgagctgagatagtgccactgcactccagcctgggcaacaagagcaagactccgtctcaaaaaaaaaaaaaaaaaaaaaaaagtgaggccaggcgttcaagccctcatctatgtaacaaaacaacaacaacgacaacaaaaatgtgaacctgtgtgttggatggtgtgtggccaccactcactgtattcacatgtctgataaggtcctcatgagacagtgcacctacacggttgtgtctataactgggagatgtcaccaggagcccttgtatgagtccgtgtccatgtcatattcatgtgtctgcgtctatgattgtgtcactaggaatctataggtatccataggtatgactgggaccatctaggggaagtgtcactgggtgacggtgtcctggagtgtcagaaacagtgtcctggctgggtgcaggacctgtaatcccagcactttgggaggctgaggcgggcagatcacctaggtcaggagttcaagaccagcctggccaacatggtgtaacagtgtctctactaaaaatacaaaaattagccaggcatggtggtgtgtgcctataatcccagctactagggaggctgaggtgggagaatcgcttgaacctgggaggcagaggttgtagtgagctgagatcatgcgccattgcactccagcctgggtgacagagcgagactctgtctcaaaaaaaaaaaaaaaaagaagcagtgtcccagcactttgggaggccaaggtgggaggatcatttgagcctaggagttcaagaccagcctgggcaacatagcaagaccctgtctctacaaaaaatttaaaaaattagcggaacatggtggcatgcacctgtagtctcagctactcaggaggctgaggtgggaggatcacttgagcccaggagttcaaggctgcagtgagctatgattgtgccactgcactccaggctgggtaccagagcaagactttgtttcaaaaataaataaatatggctggacatagtggctcatgcctgtaattccagcactttgggaggctgagatgggcagatcacctgaggtcaggagttcgagaccagcctggccaacatggcgaaatctggtctctaccaaaaatacaaaaatcagccagatgtggtggcatgtgcctgtaatcccagctactcgggaggctgaggcaggagaatgatggaacccaggagacagaggttgcagtgagctgagatcgcaccactgcactccagcttgggcgacagagtgagactccatctcaaaataaataaataaataaaataaagaagcagtgttcctgaaggctgagcctctgtgtcaacagtgtcttatcaggggctgtgtgaaggtgtgtaggacagagggtatgctttctgagagtaccaaaccagggtgagtggaaggggcaggtgggaccagagactctcagagcagggagctggggttgtttccaagtttctctccttcattccctcacatctgggtatatctcaccctccatcttgctatgtctttttttttttcccttgggacagggtgtggctctgtcacccaggctagagtgcagtggtgcgatcatgtctcactgcagcctcaaactcctgggctcaagtgatcctcccaccttagccgtagctgggactacaggtgcaggacaccacgcttggctaattaaaaaaatttcttttttctttttctttttctttttttcttttcttttttttttgagacagtgtctcactcttgttgcgctggctggagtgcaatggtgcaatctcggctcactacaacctccgactcccaggttcaagcgattctcctgcctcagccttccaagtagctgggattacaggcgcatgccaccacacctggctaattttttgtagttttagtagatacggcgtttcgccatgttggccaggctggtcttgaactcctgacctcaggtgatccactcgccttgacctcccaaagtgctgggattacaggcgtgagccatcgcgcccagcccttaacatgttttttgtagagatgaggtcttaccatgttgtccaggctggtctcaaactcctaggctcaagcattccacacaccttggcctttcagagtgctgggattacaggtgtgagccatcacacccggccgctatgtctttctatggctgtgtgtcctctgacctctcagcacttctgactttgtctggctatccccattcccctgatttttttttattttttatttttatttatttattttttttgagacagggtctcactctgtcgcccaggctggagtgcgatggtgtgatctcggctcactgcaacttctgcctcccaggctcaagagattctcctgcctcagcctcccgagtagctgggattacaggcgtccaccactactgcccggctaatttttctatttttagtagagacaggttttcaccatgttggccaggctactcttgaactcctgacctcaaatgatccacccgcctcggcctcccaaagtgctgggataacaggcgtcagccaccgcacccaaccccccatcccctgatttttcccattgctaagcacagcacaccaggcaaggagggtccaggggtattggctgactggtcctgtcccgtctctcaccccaacccttcctctcccatcttgctcccgggctctgcctctccgtggtcttctccctccacccgtccttcctcattggtgtgtttctctccaccttccaggtctctcccgttgtttctccctcttggattccccatgtctttccctatctctgtctctgtctttgtctctcttctgtctctttccccacctttttttttgtgagacggagtctcgctctgttgcccaggctggagtgcagtggtgtgatctcggctcactgcaagctctacctcccaggttcacgccattctcctgcctcagcctcccgagtagctgggactacaggtgcccttcaccacgcccagctaatttttttgtatttttagtagagacggggtttcaccatgttagccagcatggtctcgatctcctgacctcgtgatccgcccgtcttggcctgccaaagtgctgggattacagtcatgagacaccgcgcccggcctcctttttttttttttttttttttttttgagacacagtctcgctctgttgcccaggctggagtgcagtggcgtgatcttggctcactgcaacctccaccttccaggttcaagtgattctcctgcctcagcctcacaagtagctgggattacaagcatgcaccaccacacccatctaatttttgtatttttagtagagacggggtttcaccatgttggccaagctggtcttgaacccctgacctcgtgatctgcctgcctcagcctcccgaagtgttgggattacaggcatgagccactgtgccctgccttctttccccttttgtgtctcatttctcccactccatctcctcttgtccattcttcccagccctaaatcttctcctatttatgtctcttttcatctctctccttttctcctaatttttccctgtccctctcatctccctatctctcctccttttttctcttgtttatttatgtatttattttgagacagagtctcgctctgtcacccaggctggagtgcagtggcgtcatctctgctcactgcagcctccacctcccacattcaagcaattctcgtgccccagcctccggagtagctggaattacaggcacgtaccaccacacccggctactttttgtatttttagtagagacgggggtttctccatgttggccaggctggtctcgaactcctgacctcaaatgatccgcccacttcggcctcccaaagtgctaggattacaggtgtgaacccccatgctcggcctcctctctccctttatctctgtctcttcccgttttttttctctcccagtgtctccttatctgcctctccctgcctagtctcccgtctctctccatctctcagtctccgcatctcttctctcatcatgtctctcccatcttttttcccctcatttctctgtctctcagtctctccagcttttcctgtgtctctgtctctccccatctctgtctctccatacccagtccccatgtctctccatctccatgtctccccatctcttctctctccccatctctctcatctctttctttctttctctttttctttctctctctctctctctctctctctctctctcgctttctttcctctctttctctgtctctctctctctctctcctttctttctttctgacggagtctcactctgtcgccaggctggagtgtagtggggagatcttggctcagtgcaacctctgcctcccgggttcaagcgattctcctgcttcagcctcccgaatagctgggactacaggcgcgcaccaccatgcccggctaattttttgtattttagtagagacaggatttcatcatgttgggctggatagtctcgatctcctgacctcgtgatcggcccgcctcggcctcctaaagtgctgggattacactgcgctcggcctctcatctgtttctttccccatccttctgtctctcaatctctccagctttctccggccctcccagtgtcttcatctctccccatttctgtctctccccaccaggtctccctatctcttcccatctctctccgcatctctgggtctcccatctctggtctctccctgtctctcttttttctctccccatttctctgtctctccccatctccgtctctctcatctctggtctctctcatctctggtctctccctgtctctcctgtctttttccctccccatttctctgtctctccccatcccggtctccccgtctctgtcggcccgggtgggtccgggtgggtccgggacggcccggcccgggcgccgcggcgaacaatgccccattcacgcgggccgccggcgccatggcaacgcgcccgccccgccctccctgcgcgcgggccgcgcgtgccaagaggatgccatggttacgtcaggcgcgtgcccgtcgcgcgcgccgccgtcccgcgcgctcttgcagggaggggccaggccagcagggggcgcgcggcagtagcctctgcccggagtcagaaggggcggtcttccccacttcaaggggccttcagctgcttagtgcctcagtttccccatctgtaaaacgggggcgatgggcaaagctagatcggagtgtgaaagagacagaaggaggaagggagaaaggggaagaaggcggcggtgctccttggggatggttgtgtgtctgagtttgcatgagtcagtgggtatatgtgtgtgcgaatttgtgggtccatgtttgcgcgcttgtgtgggtgttttatgagaagttgagaagtggttggttgtaatttgggggtgacttggggcccatgtgtttggaagtgtgtgtgtttgtatttgcacacttgtgtgtgatggtattagccggtatcatttgtgtgtgataatgtgtccgtgtgtttgtggtcctgtgattgtgcaccccatgtttgcctgtctggtgtgtggtgtgtatagtgggtgtctgtggtttgggtgtggttgtgggttcggggaactatgtgtcccatgtttgcatgtctggggtgtgtgtgtgtgtgtgtgtgtgtggtgggtgtctataatttgggtgtggttgtgagttcatgtaactgaaccccatgtctgaatgtctggtgtgtgtatgtgtatgatgggtgtctgtggtttgggtgtggtcgtatggttgtgagttcatgtgactgtgcaccatgtttgcatgtctggtgtgtgtgtgtgtgtgtgtggtgggtgtctatggtttggatgtggtgtgtgtggctgtgtttgcatgcctggtgagtgtgtgtatgggtgtatgtgtgtctgtgatggtggatggctgtgttgttgggtgtgattgtgagtttgtgtgaatgttgtttgcgtgtcacggggcctgtgttcacaaactcacgtgtgcttctgtgtggaactgggtgtgggttctgaggacttcggggacctggccaagtctccctcccccacctgggggcctcctggcacggaagggggtgaccagctgcctgggacctccgactccccacaggttcaggagagccccagctgatgaatattcatgaggtgggggggctggcacccactgccaacagctgcgtgtccattagtccccctccctgctcttcctgtactgactgcaaaggggagggggggtgtcggcgtgtgtctgtccctgtttccaagactcgggggcgggggtgtcctagggacaatcgtgggggcccagtcagcatgcctggctgcttgtgtggacggctaaggggctgtctcaatgttgtgacaggcactgggagagtgactgttgtgtgacaggttgtccttgtaatcgtggtgaggctgtcacccacggttgcattgtagctccttggtctggggactgtgggcgttgtgtggcagcgtgagtgagctgtgtacctgtcacctgcaacagggagactgtgagtgtgtgctattcgagtgactgtgaccagtggtctgtacctactggctgcctgctctgtgacacagtgacaacaagggtgtgttattgtgctattggaataactgggttggttcaaaccttgatcaagggacagctgcggtctgcaccctggggaggcagtggtcagagctgcttttcctccttgtgactgggtggggcggtgactccgtgtggccacgtggctagcacagctgcagggacatgcggactgagtatatcagtgtgcctctgctggccagtgtgacgttgatgtggtgtgagggtcagagtgtcggggttcctgggaggatgtgtgagaccgtgcagctgaggtgtgtgtcaccagaattgtcaagggtgtgaccgtagttcttcatgtgacagcgtggctgagggtgtgatggtgttgctgtgcaggtgacactgtggcagtgaatgcgtggatctttgtgtggttgaaggtgtgacagtgattgtgtttgatgatctgaaccaaagggctatgactgtcctaccctcacttccaggctgcacagggagagctgggtgctggagtgagggggctcctggcatgggattggcagctgcctcgccaggggccgcacgtcagcctgagactgggacacctggagatctgatgccagctggggcacagaacctcctccctccatcttcccctccataggctgggtttggaggagtggcctctagatgcagctgggaccagcagggggtggggcgggatgtgcttctctggtctaggggactctggcctctggctgggtggccctggaggccccaggttcccagcatacgtggcttggccaggaactcagtgtggccgactcagcccctctgatacccacaccctgggacggctgagcattgctggcggccccagcggcagcgcacagaggctcctttcacgagccagggccaggtttccagggcgggtgggtctccggctggcccgctgcaaatgaaacgtttccccagctccttccctttcgtctccagatgagcgacggccacaggaggccctggccaggctgtgctgcctaggcaagtgtgagtgtgtgtctgtgtttccctgtgtgtgtgcacgatctagatatctttgtgtgactttttgtttcttttttattttttttcaagacagagtctcactctgtcacccaggctggagtgcagtggcacgatctcagctcactgcaatctccgcctcccaggttcaagtgattctcctgcctcagcctcccaaatagctgggattgcaggtgtgcgccaccatgccctgctaatttttgtatttttagtagagatggggttttgccatgttggctaagctggtctcaaactcctgacctcaggtgatccacccatctcagcctcccaaagtgctgggattacaggtgtgagccactgcgcccggcctgtttctttttttgagataggatctcactctgttgcccaggctggaatgctcactgcagcctcaacctcccggactcaagtgaccctcccaccagattagctgggaccacagatgcacactctatgcctggagaatttataaattttttgtagagacacggtctcgctatgttgcccaggctggtcttgaacccctgggctcaaccgatccacccgcctcggcctcccaaggtgctgggattataggcgtgagccacggcgcctggcctttggtgactttttgtgtgctacatctgtggatgattttgagaacatcaacgtgtgtgacccatcgggtacatgcagtcctgtgtgagatttttgtgaacctgtgtgacttagtgtggcctgtgtgtacctgtgtaactcagcatgagattctgggagtccatgtgactgtgcgtctgtgtgtgtctttgcaacgcggtgtattgtctgggtctctatggggatctatgtgatggtgaaggtctttgtgtgtatgacctggctgtcactctgtgggtggctctgggaaggcctgtgtgggatttttggcgtgactgtgtgtgtttgtatgtctgtgtgatattctagaagggtgtgtgatggtatctgggtgaccctgtgtctgtgtgtcattctggattttatctgtgggaacagaggaggagaggaaaaggggggaggggagagggaaggagaagggtctgtatttctgtgtgtctgagtgtgcctgtgtatgtttgggtgcccctgagtgagtgtgatagtgagagtctggtgtctgcattcacatgtgtgtggtgtggttgtgggtgtccctcgaggtgtgcctcagaagcaacgacctgtaactccccaaattgagtccctaataggggcttctagaccaccctggaaggcagacagtgatttcaaggctaggaccccaggcccggagcacagatcatgcctaccacgctaagtacggggacatcaggccctcttggtgggagtggggatatccaggttctactgggggtgcctagagcacccttttctcccagcctggcagcacccatggcctggctccctgcctatgctacatgccagatgtttgcccacctcacccaagagccctgctcagttgccaagcagccctggagcctcacgttgcccggccccacattctgtgccccagaatgtggctgccagagcccagatgtttcagccctcccctcacccacatccacactgcccgcagcatcctggccaggtagtgccatgggcctggctgccgcttcctgctcctcgtcctaccccaacacacctgcatggtaggaacgcacctgctgctagccacagccaggtgggcagcctggcagggaggaatgtgggggattccagctgtggcatgccagctgtgcccagccccctggcggcaccctcctcccgtgagatttctcgaaggccaggtgtatcctaatacttgggccccggggagggggagagagggaggggcagcgctgccctctctggcagtccctctgccttcccataaattcttcccattgcagttgtggaggggagcagagtgagggagtgtgtgtgtgtgtgtgtgtgtgtgtgtgtgtgtgtgtaggagggtgctgtcagtgtagaggaggggtgctgaatgtggggaaagaactttgaatgaggatgtgtgtgtgagtgtgagagtgagtgtcttgtctgtgtgagtgtggatgtggtgtgacagttgtgtttgaatacaaggaagtgtgtgcgtgtgtggcgtgtacatggggagggtgttatgggaggagtatgtgtatacaaatggaagtgtatgtgtgttgtgtgtgtttttgtgtgtgaatggagggatgagttgtgtgtgtgaatgaataataggtgttctggtgtgatactgagtgtcatagagtccgtgactgtgtgtgtgaaggatgtgtgtgtgtgcacctttggaagtctggtgtcctgtgtgtatgaatggaaggacaagtttgtgtttgtgaatgaaggatgagtgttgtgtgggtgtgaatgaagggtgtgttatgtgtgtaaaaatgaaggagagatggccgggcgcagtggctcacgcctgtaatcccatcactttgggaggctgagacaggcggatcacaagatcaggagattgagaccatcctggctaacatggtgaaaccccctctctactaaaaatacaaaaacaaaattagctgggcgtggtggtgggcgcctgtagtcccagctgctcgggaggctgaggcaggagaatggtgtgaacccgggaggcggagcttacactgagccaagatcgcaccactgcactccagcccgggtgacaagtgagactccgtctcaaaaaaaaaaaaaagtaggagagatatgtgtgtggatgaaggctgggtgtcgtgtatatgtggatgaaggatgggtgttgtgtgtgtacataaggaaggctgggtgttgtgtgtgtggatgaaggctggggtgtgtgcgcgcgtgtatggaaggctgggtgttgtgtgtgtgcgtatggaaggctgggggtgtgtgtgtgcgtatggaaggctggggggtgtgtgtgtgcgtatggaaggctggggtgtgtgtgtgtgcgtatggaaggttgggtgttgtgtgtgtgcgtatggaaggctgggtgttgtgtgtgtgcgtatggaaggctggggggtgtgtgtgcgcgtatggaaggctgggtgttgtgtgtgtgcgtatggaaggctggttgttgtatgtgtgcaaatggaaggatgggtgttgtgtgtgtgcgtatggaaggctgggtgttgtatgtgtgcgtatggaaggatgggtgttgtgtgtgtgcgtatggaaggatgggtgttgtgtgtgtggatgaaggatgggcgttgtgtgtgtgcatgtgaaaggatgggcgtttgtgcatatggaaggctgggtgttttgtgtgtgcatatgaaaggctgggggtgtgtgtgtgcatatggaaggctgggtgttgtgtgtgtgcgtatggaaggctgggtgttgtgtgtgtgtgtatggaaggctgggggtgtgtgtgtgcatatggaaggctggggtgtgtttgtgtgcgaatgagagcctaggtctgggccaggtgcaaggaccaggaaggccatgagggaccatcagcccaggagcccggggcctgggggctggtggtcacggctggagcacaggctggcaggtggggtagggcagccagagttggggtttctgagccatgtgccccctcacagccatttgcaggggggtgggcagggtctgcctggctctcaagatcctccaagcccccagctccatgaagggtctcacacctccccgggccctttcccacagcttccccctcagtccccccacagacccacactgctctgctgtcctcttcacccaggacccccagatcccccagacattgcctctgctcctttccacagccatctgagcccccgccctgcctccatcccccatcactccctcaaagcccgcatgtccccaactccttctcccagacatcccagcctctctagggcccctcaaaagcccccagacgcttttccgttcatcccttctgccttttccagctcccctcccctccctacacctggacccccattctgtcctctacccctttccagaaccatccattcatcggcccaacccccttgatccccaaatccctttctggcccttcctccagccccttaccgctcccagccccccacggggccccgccccttcccctctgcgcccccacccccacccccgctccgcttccaacccctcccccgtccgccccttggagccccctccctcttctggggcagcggtggtgtggaggcaggcagccgcagcactcctgaaactttaaacggtgttaaaagtttctgtttacgagaaacccttgaatttttaaggacatatcgattccctgctccacagccttgcctcggtggcgtggcggcctcaggcacagtggggaggcccagactggagggagccggggttccgaggcccccaagcaccgaatgacagatacacgcctacccagacacactctcaggcacacagggacgcgatccctgatacactcacacacacacagctagtcacacacagacatggcctgacacagacacacatatcaggacacacagagacccctccctgacactgacacacgcatacaccagtgtgtgtatacacacaccgacatggcctgacacacacacagactcacatctctgacacaggtttacattgacccccctccctgacacacacacacccacccacacacacccacccacacacacatacactcctagttacacacactgatatggcctcacagacacacacattgacatggcctgacacacacagactcacatctctgatacaggttcacagggactcccccttccctggcacacacacatacacacacctagtcacatacactaacatggcctcacatagacacacacacacgacctgacacacacagacacatgtatctggacacacagagacctcctccctcatacacagacacacacaccgacatggcctcgctctcgctctctctcacacacacaaacatgcacacacgcatggctacacacactctctggcatggcctgacacacacaggctcacatccttgtcacacagagcccccatgtcctgacagccctgatccctgacactcctgagcacctgtgtacacaccctggtacacaaagatcctcatcaccgccctaggtccacatagcaaaacacacacctagtgacacccattgacactttctgccccacagaccctgatcacaaacagggctggctatgcccattgggctcttgcaagcaggtcccagacccactgggacccttgcacagtcactcacgtgatcacacttcaagacacacacacacacagacccatatacactgacactgcactgttgtccaggctggagtgcagtggcgcgatcatggctcactgcaacctccgccccctgagctcaagccatccttccacctcagcttttggagtagctgagaccacaggcacgcaccaccacgcctggcttttttttttttttttttttttttgtattttttgtagagatggaatctcatcatgttgccaagctggtcttgaactcctgacctcaagcaatctgcccatttcagactcctgaagtgctgggattataggcatgagccaccgcatccggcctacactgacactttttttttttgagacggagtctcgctctgtcgcccaggctgaagtgcagtggcgtgatctcggctcactgcaagctccgcctcccgggttcacgccattctcctgcctcagcctcccaagtagctgggattacaggcgcccgccaccatgcctggctaatgttttgtatttttagtagagacggggtttcaccgtgttagccatgatggtctcgatctcctgaccacccgcctcggcctcccaaagtgctgggattacaggtgtgagccaccgtgcccggctggtgtttgcttgcttgcttgcttgcttttctttttctttctttttcttttctttctttcttcctttctctttttctttttcttttctttctttctttcctttcttccttccttcctttccttccctcctcttccttctttctttctttcctttgtttctttctctctctctctctttttctttttttcttttcttttttttgagatagagccttgctctgttgctcagtctggagtgcagtggttcgatctcggctcaccgcaacctctgcctcctaggttcaagcaattctgcctcagcctcctgagtagctgggattataggcgcctgctaccatgcccggctaaattttatatttttagtagagatggggtttcaccatgttggtgagtctggtctcgagctcctgacctcaggtgatctgcctgcctcggcctcccaaggtgctgggattataggcatgagccaccacgcctggccatggtctttattttcttcccccaccatgtccccagtgcttggtataggaccgggcaggcaccttctctgcctcatgacaccttaagtacaaagtcagacccagtctctgctgcacaacatacagatccacacaaaaagattcttgctttgttttttaaaatttttattatttatttatttatttatttatttatttatttatttatagatggagtgtcgttctgtcaccaggcaggagtgcagtggcgcgatctcagctcgctgcaacttccgcctcctgagttcaagtgatctccggcctcagcctcccgagtagctgggactacaggtacacgccaccacacccagctaatttttgtatttttagtagagacggggtttcaccatgttggccatgatggtctcgatctcttgacctcatgatctgcctgccttggcctcccaaagtgctgggattacaggcgtgagctctccctttctctctctttcgttttgagacagagtcttgctctgttccccaggctggagtgcagtggtatggtcttggcttactgcagcctctgcctcccaggttcaagcgattctcctgcctcagcctccctagtagctgggattacaggcatcccaccacgcccagctaagttttttatttttagtagagacagggtttcaccatattggccaggctggtctcaaactcctgacctcaggtgatccacccgcttcggcctcccaaattgctgggattataggtatgagccaccacgcccagccagactcttgcacctatcatgacctgcatttcttcagtgtccccggaagacaccagacccatctagacacccacagacacactgcctgccacacagcctaatacagtattgtgacaaggagcatatcgtttctgggacatttacacacatactcacgtacacatgcatacttttgtgcctgcttgcaagagcccaatgggcacagccaaccctgtgtgcgtgcgcaccccccgccctgggcactgacaccccctttaacagacaatgcatagctgagaattgccacagctttttggcccaagagagcaagaaggtgctggttgcacctggcagcaggcgggtgttttgtctcagcaggagctgcctgggggctgtaggcactgcctccccacccaccctgagggttaccagagggcttcctctccccttgctccagggtccccagcactacctctccccccaggcctttatgttctgaaaatgaggagtcagggcccgcaagaggggctggaacctcaccaaagtgtgtgtgtgtgtgtgtacatgtacggaggccctgatgcccaattctgtccctgacagctgagctgtgggtctcctgctatatttgcctatgtcgatgatcagggccacattacaagtgtgttggggggggggcacgtaagggacatgggtgtatgtgtgtgatccctgtgtgcatggctagatgattctcccaggggggttgtcagccgcctgggcatcagttggtcagtgtgtccaaggcctgtgggtacatctgggcaacccagtgtgtgtgtgtgtgtgtgtgtctgtgtgttgtgttgtgacagccagtgttgctttgtatctgtgacgctgtgtatctctttgtattggggtcctttgcattcacttccaggtgtttggtgtgtgtttatgtgacattgtgtatcttcccttcattagtgtcatcttatttatttagttattttttttcagacagggtcttgctctgtcacccaggttggagtgcaatggcactatcatggctcactgcacccttgacctccccgggctcaagggatccccccacttcagcctcctaagtagctgggaccacaggcatccaccaccacacccagctaatttttgtatttttggtagagaggggttttgccatgttgtccaggctggtcttgaactcctgagctcaagcaatccactggcctcggcctctcaatcatcagtgtcattctgtacatcggggtgtactgccacaactgccagtgtgttctggcactgcgatgtgtgtgtgttgtgtatgtgtctgcgtgtaggaattgtgtgtctggaaggtgtcagcgtgtggctgtgtgatcttgcatgtgtctgtgttctgcaggaacatgcgtcagtgtgtgtgcatcagtgtgcatctctatgtgtcatgcactggtgtgtcttcgtgtatatcagtgtgtgtctacgtgacgcctgctttggtgtatgtctatacgcggttccttgttgtgtgcctggataccatggtgggacggtgcatgtcagagcgtgggtcgtgggtgttttcccagactgctgtgtgtgtgtgcccgtgtgtaggggttgtgtgtctgtgccttgtgtgcactggtgtccgagtgtgctttgtgttcgaaggcggaacgtgtggccaggcgttctggacgtgacatgtgtggcggggtccgagtcccgctgcgtgtcagcgtgtgtctgcgctggaacgcgggccagcacgtgtcagggcggccgcgtcggtgtgcgcccccgcgcgcgcgtgtgcgtgtgttcgtgtgtgtgtgtgcatgtgtgtgcttgtgtgtgtgcgccggccgccgctcccccgccctgcccgcccctccccgcgcccctcctcccgcccgcgccgcccgcccgctccctctccccggagtgcgccgcttccaaactttgtctaaactttcactttcacagcgcggcggctgcggcggcggcggcggcgggcgagggtgaccggccgagcggcggcggcatggagtagacgcgcggcggcagcggcggcggcggcggacgcgagaggcagcggcgagcgcggcggcggcggcggcagcggcggccccggagccggcggggccgagcttgcgagcggcgagcgcggagcggcgccgggccgagcgcggggccgcgggccgggcgggcgcagcgcggcggaggccggaggagccgagccggagcccgagcccgagcgcggccgccgcctgccgggcctcccctcgccgcggccggccgccgcgctcccgcccgggcgcccagctatgtactccccgtactgcctcacccaggtaccggccgccgcccccgcgcgaccgggggaggggagcgggcgcgggaggccggccggcggcgcgggcggaggggacgcgcggcggccgggaagggggggccgagagcccgcgggccgccgaggggtgcaggctgtgccgcggggagcccaggcacgcgtgcgggcgtcaccgtgcgcgtgcgaccctggccaccgggcggactccttttgggggttccgggggtggccagctgcgtcgtggcgctgcccgtggagcgcaggcgggagtgcgtgtacgtgtgtgtgtgtgtgtgtgtgtgtgtgtgcgcgctcgactggggtgcgatgggcagcgggactccggctgacctgtgggctactgtagcgcgcacccgggcagcgtggtcgctggcagtgtttgcggggttgacagagtggcaagagggtggtcccgagggcgcagaggggacactgggtcccgcgacgcttcctggggagggcgcagcggttcccgagggtggcagtggccggcgtgcgtggcggcggcccttgcgtgcggccggggtgcctggggtgggccgagcggcccgggcgtctccccaaagtctttgtttaggcctcacatgggagcggggctaagaaaatggcggggctcccaaatttcggaggggcaggggaggggagaggggggcgggcgcgctgccagcggtggccgcgcctctccgaccccggacgtcgcagcctctgcccccccacccccaaactttcctcggcgcaaactttctggccccagcgacccgggctgctgcggagtggacccggcaggcctggggaatcccgtcccgtcgcctggaggcgggaggggcgggaggcagccgtggacacagccgacagtgctgcggccacaccgtcgggtcagcctcgggcacaacagcgccgaccttggcgcgttgctagagcgcgtcccgcctgcagcgaagttccctgcgcggcgcacggctgcggcaaaagcttcgaggatgcctgtcgggccacccaactctccctgggctgtggcctgaggctctaagagggcacagaagctgcccagagtcccacagtggccctgacagcgttgcctgcagggccaagccacagctggtaacagtctccgaagaggggacatctaggggctgcttagccctgctgccagccaggcctgcatgtgggggttctctaggccaggccctaattgtcccctctgcccagcctgatccttgtcagccatgtgccaagtgtgtccacagcttacagtggcagtccacatgggtatggctcctactttgtctgggtcctaccgggagtgtgcagtggtgtcaaggggcgaggggtttgtcggggtgtgtgtcagctgtggctacaccacactcctgtatgcacaggtgagagtgtatgcaagtgtgaatcaatctagagtctgtgtgtagcccctgtgggccggccatgggcaggcctgcgtggcatggccgtgtgtgtggcccagggagcgggttttcctgtagaaagcaggcccaagtacgtgttggcgagggcgcaccggcatgcatacatgttgcagtgtgcatgcaggtgtgagcaggcaccctgagcaccatggcagtgtggggaacccccacatctgcacctccagttccacggccactccatgttgggcgcccctcacaacaactgcctacccagcggtgtctgagctgggcctctttggtgctacacttggctgggctgtgtggccgatgtttggggcctagtggaaccaagaccccacgctcaagcagccccttgcccaccaggctgccagcccggcctcccatgccaagcacgccagacatctgagcctgctcccccatggcttgggtgagacaccagcccctcagatttcacagcaccctgggagagaaaatgcctgtggatacgccggtgacatggctaggaaggggctggggcggctgcgagacccagggcgatggccggtgcttggctctgtgtgattgtaggcccaggttacgacagttccagtgtgccaggatggctggagaggggagtgggcatggtgtctccaggctgccagcccttcatggtgggcagggaaacccttcagctctgggcaggtggctgctgtcggctggtcagtggggtctggcctgcccctccctaacaatcacatctctgtttttacaaatctttctgcttccatggtttgccccgctggtctctgtttttatgacaacctctttcctttgctgtctttttctcggtctgtttttatcggtctctggtgtattctgcccttttccatctctctttctccatctctgtccttttgtatgtctctgactgtctctgtctctgattccagttttggccccatctctgctcccccctccactggcgtctcggactctctctctctctgtctctctggcctgcctctctctctttccctctctctctctcccttttctttttttcaaaccagaattggcttcgattttaaagtcaataaatgattgagcaggaacgagcttggagcagcggggccctggcggggaaaggtactgtgggcgagggggaagggcggggggaaaaatctccttctagaaaaagcatcgaaattcagggcggccgggtggggcggttcctggagctgctggagtccattgtagccacagtcctgagtctcaggcggagagaggggtggggggtggatggatggacccccatccccatcccaaccctgccaagaaacagagacacaaccaggatgtgaactcacgtacaccaccatcaccgccaagatggggatgtaagtgtcctgttcacaccgatgtccagacccacgaccatcgacgagcctacagacctacggacacaggaaaccgacgacttgtgttcacactgtcacacacacccattaacacacacgcacctcttgaaatgggacacgtatattggtgtaggcttagcgacacagcagtacctctttgacgcacgtatggacacaggaaactgtggacttgtgttcacaaccacccccagcgcacacataaacactcacaaacccctcgagatgatacagatagcgacgaaggcacatggagaccacgacacctcccagactcatggagccctgagcacatgcttggatacaggtagacacaaatgtgtgttcacccccacacatgctcacatggacccaaggacggacaggcggatggatggatacacatctttacacagagacataatgcagttggctcgctcaggtgtgtacacaaataacttttctttttctattttttttttttttgagacggagccttgctctgtcgcccaggttggagtgcagtggcgtgatctcggctcactgtaacctctgcctcccgggttcaagcaattctctgcctcagcttcccgagtagctgggattacaggtgcccgccaccacgcccgggtaatttctgtattttttagtgaagatggggtttcaccatcttggcccggctggtcttgaacttctgacctcgtgatccacctgcctcggcctcccaaagtgctgggattacaggcatgagccactgcacccggccacaaataccttttcaaacacacacacacacacacacacacacacaaatatgcaccaatgcgtgcttccccctccttgccacagggataaaaaggcaaacatgccgacatttgctgacacacacaaagacatacatggccgcacacacggatacacccgctctcagacacgcagcgacctacgcccattttcctggccatacaagcagccgaacgttcctgtacttctgtatctgcatagctcccccaacactccttccatgggagggggatggctggggcttccctgatgcccccttcccccagctttctctctgggtcactctggccacccctctgtccctgcgaagctatagctctctgtccctgctccggcctggtgccctgttttcatggcacttggcattttctctccggctctggccctgcctgattcatgcccactgctggggtgggaggtgtgcccaggtgtgggccgggatggggtagctcatgagatgagctggggctccgtgagatgttttgatgctgggccgagctcagagccgagggctctgccgggaacagggtgctccagtctctctagggcctggaatgtcttgtgtagcctcaagagctcccagacggaggctgcgggagcggagtcaagggctaggctttgccgtcagacagaaatgggttcgagctccagctctacatgttctaatcttgcgacctgaagcacaggattttcctggcctgtaaaatgggcaaaaaccagtgtctatctcttgggctgtacttaggttcaatgtggtgcctggcacatagtgtgtgctccataaatggtaattgttgccaattgttggttgtcaacctcccagaccctcccagctgagagagggatgcctctgaggggtagaagacaggatcgagcacctcccaaccatagatatccaagtggactgcctggaggaggaggaggcaagaggagagtttggaaggatgagagtttgcacatggcccagctcttttacctttggatgggggcctgtaggccaagcagagggtggcacaacttcaagataggggagagatggtgggggagagtggggggcaggaggggagagacgaggcctccactgttccatgaggaccagataccctggttgggggccctgagtcctggtataagagtatgtgtgcacgcattcatccaaatgtatgtgggacaaagagacccggtgcatctagatgatgacttcagggacgtccccaagctccagaactttctgtgtctgcacctgggcgttgtcacctggacccgccatggagacaggacatatgtgcaggaccctatggtgggcacttggctggatcagggcacattgcgggtgggagcaatgctgggtgtttggccgtggcgccgtggctgtgggcaaaatgcccccgtggttggtgtgttgactgccgtcctccccatctaacccacagggagcctggccttttaaatctgctgagatattgtctcccccacccccatgaagctggaatctggggacttgctggaccagagaggtaggggaggctgggcactttctccaacacggtgctgagaatgggccttctgtcccctccctcccagctggggtggggaaaaggaggggggtgtcttaattttcttgcccccaaagccctggatgtgggggcaagtgggccaggaggacagctgtgagccactatctgggttctcccagatcggtgtgcatgttaatcggcatgtcaggcctcagagccaccattttcccgaggatgtctgtgtggcagcgtgtgtctgcccgggtccctctccatgcctctccatgtctcccagcgtccatcactgggtgctacctgcatgtgactccacggatcatcgcacgccctgtctcttgtgtatttggtagtgggggtcggggagcgtgccaccatgcgtgtcagtgtgccggatgtagtctctgtgtcacggtggcgctgcgcacgtcaacgggtattggtgtaccggtcaccatctttgtatctgcgctttgtatctggggtgacagtgtcccagcgacatgcgtcacatctacagcagtgtttttctgggtgtctgtgcgtcacggcaaagagtgtatccgtgtgtctcacacacgtgttggcctgtccgtgtcaacttgtgtccacatacgtgtcaacgcacgtgtctccagtgtcatcaccctcatatcactgtgcctcctgagcttgtccccgtgacaatcactgtgggtctcaccccacgggcgcctctcctgggcattcccttggcctccgagcaccatgtgagatgcctgctatggcggccgggcaagcggctgggagcgggctggctgctcagtcccttcccatgaggttgagcggccgcagtggccttgctgggggccccgcccgtgcccctggcctggcgtggacagaagcccgttgtgcggcagcgaggtgcgggcgtgtgttcgggccgcccacaggcctccctctgtctgcccggcgcacattgatcttggcttctgcctgtgtccgttctagcctggccagctgggtgtccggctgtctccgtgggcctgagcccactatccccgctgcccccacagccaggcaggccctgggccccacacccctgggccacccgccatccctccgaggctctgagggcgcggatttggaaactgaggtccccccttctttccccctttctctctctctctttcctccctctctcctcccctcctcccctcctcccgctccctctctccctctctctctcctcctgccaaacgcgtcttggctccgtctgaatatctctcctcctcgatttttggctccagctctgggcgcgttcactaaaggaagaagggctagctccccaacccccccttcctcaccacctcccccctcccgaggagcccctctgagggcgggagtggcctcgtgcaggggcctgggccccctgagtgggcttggccaggggggcacaggcctggcgggtgagggaacagggtggacagggcctggcagccagagggaggcaatgggcagggtgactgagctgcccggcggggcgggcgggcagggaggggtcgggggcacggagctggggtgtctggcttctggtggggctggcaggcctctgtgaggcgcagctgtgcccagaactccaagttgcgtttgccaccactaccgatgtggctgcgccagccagggaggggaggcgggtagcgggcactgcggcgctctgcagccaatcggaagccggggttgcactggggagctctccccccactgggccccaccctgaggggagccgggggtggtggccagcagtgggcagggggcagtgcccaccaccatcgccaaggaccctgccccctcagctgaagctcagtgccagccttcctggcacagatcgggcaagagcggggatctgtctgtccccacctgaatctgtgtgagccaagctggaggaaaggacagcatggaggtgcacccgacccccctgggccttttagtccaaggcaggcaggagctagggatgggttccaaattatccaggtggttccgtccaaatatcggcttcggtcgaatcatcttggggagttgggggggggtttattccgggtccatctcacacaaagtcacacactctcactggcacatgcgggcacaaagaatcacgctgacacacactggcatgctgcacctccctcaatcaaacagacacaggcgtccccatacaaagaatcttgccctcactcacagacaccttgaggcacccggccacacccgaacacatcgatgcggcattacacactcagggacgtgcatgtgggtgcagacacacgggacacgcgcagtcacacgatcacatgccatgaagcacacagcacagacacaggctctgccaccgtcaaatgcagccccacaggcacagctagaaacacacagcacacacactcagtcataatgtcagtgcccaaaacacacacatgagcaccgatacacccgcacatgccaccaagcacacaggtacatgcacatgcatgcaataacacgctctcagacacacaaaacaccccacacactccctaacccagtgtcacccaccaggagtgatttcacccattgggaaatgtctggaaacattttttttttttagagacagactgtcatctgtagcccaggctggagcacagtggtgcgatctcggctcactgcagccctgacctcccaagctcaaacgatctacccatctcagcctcctgagtagcagggaatacaggtgcatgccaccacacctggctaatttttaaatttttttgtagagacagagtctggttatgttgcccaggctggtcttgaattcctgggctcaagcagttctcccgcttcaccctcccaagtagctgggactacagccgagcaccaccatacccagctaatttttaaatttttagtaaagatgaagtctggctttgttgcccaggctggttttgaattcctgggctcaggtgatcctcccgcctcggcctcccaaggtgctgggagccatgagccaccatgcccaacctggaatcatttttggttgtcacacttgtggagggggtgctatttagtgagtggagacccaggatgctgctcagtcccctacaatggaacccctcaaccctcgccgaccacaaagaatgatccagccccaaatgtcagtagtgccaaggttggaaaccctgccatgcatccccagatacacagtaacacacacaggcacagctaacccttgacactcattacacatgcacccacatacacagtcacacccaaacaagacgccagctgacagtgtcacacacacacactctccctcactaggacccaggcattgtcgcatatataccccatttcccctgccaaacccaggcacagtcggcgtgccatgtacacagtccagtgttaccccagcacacagggacgagagccacacccccacacatattcgcacctgggccacacctggcagtggttggaaatggtgcctgagagctgagacctgccctggtggcacctcccctctgcttgtcagccacaaccagctgtctttgcgcagcagctacagccaccccagcttctcaggatagaattgggagccccaaatccctgccctggtttgtagaagcctggggtgagacaaagcctggaaaaaccacatgcccatccctgcccaggacactcgcagtcttctagactccgtggtcgagggctccaccctcacctccttgctcctggcagccaccgagagaagggatggggacaaagctaggttctttttttttttttttttaaacagtctcactctgttgcccaggctagagtgtagtggtgcaatctcagctcactgcaaccttggcctcccaggctcaagcaattctcatgcctcagcctcccgagtagctgggattacagatgtgcactatcacacctggctaatttttgtatttttagtagagacagggtttctccatgttggccagactggtctcaaactcctggcctcaagtgatccgcccgcctcggcctcccaaagtgctgggattacaggcgtgagccactgtgcctggccaacaaagctaagttctgagactcctgtcctccgtggggctgtctcactaatcctttggcctttgactccccagttctgaccccagagaaagaagagacagcggtcagcagaatggtagaagaagataggataatagcaaaataaatgtttgtcctaaaaatcgtagcaacagctaatgtgaactgtgtgcttgctgcgttgcacccttgctaagtgccttcccagcttgtcttcttgaatcctgtgttcagcaggtactgttattaggagagtggggcctgcagagccagcttcctgggtttgactcctggctctgccactcactagctgtgtaacttcaggcaagttgcttaacctctctgggtctcaatttctgtatctaggaagcagggctgtggtaaggatctgaggagttggttcacagcacacgctttaaaactgtgcttgatgtgaaaacctgctttgattttatggatgaaaaaccaagactcagtagaggtatccagtgctagggtcaagggcggggagctctttcttcaagatcgtcaccaccctaaatcctgccgatgggacaaaattgcagcttgttctctggcctttcccaaatttcaaaatgggtctgcacacccccacgcccccatttgaaacgtgccctagtggttggcccttgaacctttcttaccactctgacctttggatcttcttccatccaaggctcagaataaaggtggatggtggtctcaccccctctgcacccctgctggccaggcttgccctcacccccgcaggtccaaacatcctctcccacaccttgctgggcacccagccggagctcaaatgctgggggtgcagccgggagcctgtgcattccttcgacaaatatttaccaagcacctcctgggtgccaggctctgttttaggccccgggggctcggcagggagcaaaatctgcaaagatgccagccccggtgggagggcagactgtgaatctgataaacaagggagtgtccagtccttgagatggcgctaggtgctgtgggaagaacagagctggccgggccctcgggagtgctgggcagctgtggttttagcagaggtgggcacggagacctcatggtgagatgatgattttgaacgctgccttgctatagctcaagtgcagcccaccaggcccctttctctctccagggggcagactggaggtcaagggtgtgtggctcagcatggcatgcccatcatttgcccagaccatgttgcctgtcatttcttcaatctgagctcatctattatccatatttgtggatatgccatacggtgcccgcccaaaatctggggacaagatggccgaggcctttcctttacagaaactggggcttgatgggcactgggtattcgcaaccctgctgctctgagctgggggatggggcaggggcagctggtggcccagagtggcacttccacctgggcccctcaatttagctcccccggggcgggctgggtttatttttaccccagcctgtcaccctggcagtaccaggctgcgccatctttgcagggtcttggggatctgcccacagcttgggggtatcaggctttgtctgttgggttccccaactcccaccagggccccagattctctccacccccaaagctccaggcttgagagctctgggctggggcccggcggggtcggcactgcaggctggcaaccaccgtgcccagcctggtggcatttggtttggcgccctgcctgcctgccacccccaccccatgcccgggcagagccgagcggctgctgctgccagtctccatttcgaagcttgaggtgggggtggggaagtgctgggcgcctccaggcccctgcttgtcccgtgccacctggggatcatcccccatgcctgttccctggaagggccgggctgcctcttccgctgcccctttgcagcctggagctcagcaaggatgcccgcctggcttccatcttcccggttcgctccctcccttcctccccctctcgcctgcttgcctgtaatggctcaccatttttggcatctcttccccctccccccccataggcgccaacctcacttccaaacccgccgccatcgttggctctctggccttctctgccgcctggggctgggacctggaaatgggaatttgggggtgggggccgggcctgtggacatcaggggctttctgcgtgctcgtgtgtatctctggggttggggggcacatgttctaagccagctcgctccatccaccccttcatttgcctcaagcttgcagagcaggactgcagcaaaagtgacgaccctcccatttctgattgccctgcacctggtattggcatctgggccaccagggggctagggtgggcatctctgcccaagcccaggccctggcatggcaagggcaaggcttcatctgtggtgtgccccaacctctccctttccctaagttccccccaaggttccaagattcctgcttccactccccagagctggagtgggggaaccaagcctcgccttcggtacttgtgtccccagatggggcaagggacttcggaggaaccggtttaatgccctcccccccaccccacacccgctgcccgcgcctctctcggcactaaacaaagtttgctaagtaacttcaaatgttatttgaggacggcctggcctcaacccaaggcggccctgtggaaacttgtttttcgctgccgaggctgcaagtatcaaagacacactttcggtgggggggtgctccaataccactcccccctctgtggcaggggctggccctgaatggacacacagacacacagagcagacacacataggcctgtgcctacagagacacagacatcatcctgtggcctaaacaccaggtacagctgcaggacagccttggagcatggtacacataatacatacaacaaacacacatgttgacaagttaaggaggtaggagggggtgacagggcactacccctcagcccatggagtcctgggattcttccagctggtggggtttcgccatgttgggaaaaacgtacggctccgatccttggggtcctgtattctcatgactccagggcttgagggggtgctgggatgaggcccccagcctcagtttccccatccacagagggacactatggacttttcagcccagcctgggttttttcatccccctggcagggctgcatccctaaaggtgagtccctaaaagtgggctctgagcacagggcctggtatacaagcaatgctccagtgtcggcaggcatttctgccagtcctgaccccataaacctggtgtgttttcatcctgattggtggccctgaccccaagcagcttggggttctccgggtcccgggaggagcccatgctgacgttactcgcttgctccaatcttcccgtctctgtgattttctcactttgttcctctctttctctcctagcttttcttgatctttccccacatccctcttcttctttctccaggtctccgctggccctgcccaggcctggagctcagggaaaacgtgggaaacaggcatagggtacgcatccctcactgaagccagccaggcctgcagtcctccatgctctgagccccctgatgaccctcctttggcccccctccaaaccccagcaagaagctggaggctgggtacttgagctgacacagtaggtgaaggagaggctctgtcacagggtcctctgagacccatcacctccaaggtttgcaaacaggtggagccccactgaatccgatggaaaagccaaggcccaagaggaaaccggagtgagttcctcctgcagttccagagagcctccccatcctcgctgtagccaggtcctcaccgaggtagatttgcgggggtctcccagtcccagtcccacacactgcctcatccccactcacagtcaacgcccgcaacaccccgccacccgcagtctgtcgcgcagtgacagcctgtcacaagcaccgccgcacaccggcacaatctgtcgtccacgcacagtctcacacacaacctgtcacacacgcacacacacacacagcggcacagtcgcacacacagccagcctcacgcgatcacaccaagcgtcacagcttgtcacagccatagattcctcacaataaaaataacagctaccgactccagagcaattatgcctgggcagcgggtgggtggggggaaggcgggcatatgtgacctcctgtgaccctcccaacacgaggcaggtatgagtaacctgttttacagatgaggaaacagaggccgcaaggtcaagtgccaaggtcatggggctagaagcagggtggtggggattacccagccagattcccaggagtgagcaagacttaaacaggttcactccagcttttcatcccccttctggccacctgaggctcctccttctggccttcccatgggaattcccttcctattccccagttctaagaagcccagagcaagaaacaggaggaagaggcttcctgattccccgcttaagggtgttcaaactgtctgcccctggctgggaaaacagggccacgccctccccaccaaatgctacttggctccaagtggggtactgatgggcactgaaaaaccgatgggcagtgagggctatcagaggggcaactacaagtacagtagcactaggcttgagtgtctgatgtgtgagtggccatgtggacggctggagttggtccgcagtggtggcagcttgtggtcctttgggggatttggtggtagaacggggccgggggtcttcaaaggcagagaagtctcaggacttcaaaccaacagcctaaccctgtccacacaggtggagtggcccaccttgggcccgggggggcctccaggagccccctggcccaggcaggccccgcctccaccgccccaggggccctccgaggtccagggcgcttcctcctctgcaacccgcttttcccttgctttccccttctttgttcctcccccgcctgctcctggggcttcccccattggagttgcctcggccaaaaccaacagggctccaacgacatcccgccttggcctgccgggcgggcggccggccctgccccatggcccgctcaggggccagatccgggctcagctgggtccggacggcggccctcgcgcacgtggttactcccaaggcgtgcgcaagcactcgcacaccccctggccctgcggccccgaaggggacctaggcgcgctcatgcacgtccctgtctgacaccccagcccggcaactcggacgtgcgcacgcacataagcacgctctcgtatagttgctcccacctgggtccgcagcatgcccttgcccggcgcccccagtcgggatctcaggcaccgaaagcttatatgcgcacctaggcctgacatcccaacgacactggctggcgcacttacacctataacatgcccctatcgggcaccacatgggggtccctaacacaagcattcactcccctgctttccctccgatggagctttcgagcacaggtactcgagccctgcgccccaacggggagctccaggtgggtccgtgagcccgctctggtgcccacacacatggctccaggcccacgcgggtacacacctccccagcctgcacacgcgtgtttcacatgagtcacacacctgccaggccgctcagggcatctggcttcaaagcggcattcaggttgttgcgggagccggcagggaagggaggcctaattccacctcccccatccctctcggaacacccgcctccccatatgtccctggggcacaggtgggacatcccagaactgccgctgcccagtggcgcccctgcatgtgctatatttatatttgaaatttgtacctttatatatactttttatatgtaagaaccgctcccccctcttcccgctccacgtttgtacttggattttaccacccccactaggcttcgacccaaacctgcaaaaaccatttcgccaggcagggatgtagggggaggcgggagcagccctccccctctccactgcggacggacatcccacgttcttaaagaccggggaccccccctcccccaagggccggactgcagctccgaatcccgcagccccagaaacacaatcgcgggggtgggtgctggcggcgagacgttgctttttggtgtgtgtttgctgttaccgcttaaattaaccctgagtgacggcttgcaattcgccacaaagaggccatttaatgccccccaccaccccacctcgggagaaatttccacttgcccccgagtccagctcgggccgcacgctacccgccctccaggccttcgctccaggtgcgcccgggcggtggaggcgagttccctgcgcgcatcatggacttcaggagtgagggtgggtgggttttggaggggtgggagcagaggcaggggggtgtgccgggactccccagacgctccactgcccaatcatagctctttgatatcccagcccggctggagaaagttagatggtactccagcgtctcctccgggtccccggaagagagaagctgggctgcaccccatgttggcacgaacactccctccccagtgcctctgtgcattaggtcgcgtgcctgtacgtaccctacctgagaccgcccctccgccaagtgcgcccctcgacaggtgcccgtcgcccacaggctcctttcattgtagcctccctggaggttctcaaggcgcctggcatttcctggacccgctgcaactgactcaagactggggggagggggctcatggaggtagaggtggtggggaggtctccccagggcccaggcaggaggagggaaggtcgtgtgctttccatgtcgcgggcaaaatgggtgctgacggtcactgtcacttgcatcgcacactgaggggtgggagaggacagcacatgcctggaccgtgcaggaggcccagaaccggggcgcgaaggggccgcgggacacgagcgggccgtgcgcaaagcctggcgcgcgcgtgcgcagcgacgaaaaggcgggaagcggcgcttcgaggccccggatgtcagacgcgacctgtgtggcatgtaccaggctggctccgacgacggaaccgccatgggtgctgagtggagagtggggaccgcggaccccgggggcaggtgaggggaaactgggagcataggtctggctttcgaccgtttgtgccgccagagtcttctcaatgatccctcccaggcaccgtaggccctctagtgggtctgggtggcgtcctcccggcccctcgctgctcaagcgcggctccctcttgccggggcgcggcctgcccctcacagtgacccccccgacccaccccccaaaaagtgaccccgcgctggtgggcatggaggactgtcccagttcaccatttgctgcgtcaaaggccgccgccaaaaggggctccgatgtcggcatttttgccttaaggctagtttgtcccccaggcgcgcgggggttgggggttcagggccgcctgtgcctcagtttctctcctcctgcgcccatcctgacatccgacggaggataatgcgcgttggagggctttggccgtgaatgcgatgttgatgattgctgtgattctttgggtgcttgggagagtttggggtttaactgcccccaaatccgaggacagcttgggggcgtcccttcggagaggatctctccgcgtcgcatagtgagcgtcgtcatctctagactaccccggtttccgaggagcctcaccttcaatccccgagccttctcttttgggggagtaaaggcggggaaatttaccaggggagatttttgtttccagggttggctgggtttgggggattttgtcctccagcgagcgcggggaagaaatgtgactaagtggcagaaaatgcgctttccctttctctctcttctgccttcgggccgcggggagttgcgcagactctaaaaaaaaaacctttaaaaacccaaaacctcccctccaagtccctttcgatctacgccaccttccctctcagggctgatttcttgaatttggggcgtcgaggcctccccacccgttgctaccagcccttttgcagcacttcctgggcaggccaggggagaggacggaaaagtgaaaaaagaacgtgtgcgcccagcggacccgacttaacctgttggtggaggaggaagctggcgtcgggctgaagtcccccgagccacccctggagccagagcagcccccgagcattcagagaaagccgcccgtccccagtcccctcggaagccggtcataaacccgacttctcatcacccgaattacttaaatgagctttgatggtgttaggtccttttccacgtgcggatgactcagcccgctgcagctgcgcccggggaggtgaccctggggcagcggctgaccctgctgcgccctgtaccctggacccagacgcggcccatcccagcagcaccccccgccccaagctcccagaccacacttagctttttttttccccccttactcttcgagtctttttcctcttctctaaaaacattttttttaatttaaaggagttttattacttcttttttttttataaagcatgtgagacagaggctgaatggtagaaacaggctgttaaaaaaagaaaaatacgtgccggtgacgcttcgtggagctggcgagcctcgcctgtcccgcgactgagcttgcggtcgccccgattctctagtagaccctggcgtggggcacctgagatctccgccactgaaaaggcgctatagaaatgcaaggaattatgattttaataaaattgtctcatttaggagcgagcttctgcgctgcctctgtcgtcggagcccgggtttgccacggcaaagtctgtaatcagagaaaaataccagctttgttgagggttagaatatatcattggctaatgtgtgtggttttctttttaaataatgctaagcattggaataattaaagagtgagaaataactcgtctctcctctctcctctccattcagcattgtcttatttaagggcggaaagcgcgcttttcggcagagctggttagtttttaatgcgggctttttttttctcacccgccgttccctccgctccggtctgattcgcaaatccccaaactggcacaaaccgggaaacttgcggccggccgttcttctccccgagttggagacagccctctcctcttccctcccccgcctctgggccctgacccactgcctggtttgcgctagagccgtttaaaaaagaaagaaaggaagaaaggagccgggctctggtaccccgatgccagccgagggcgcgtttcccaggcggcgggctggtgggagagtcaaacccgggtgtggggaagcagcttcgctgcctactctgcatcctctcccctaaaaagaatcaagtatttctagagatcgcctgctcagagggctcagatcccttgtcatattttaaattaaattgaacagttctttctttccagccccatatgcaataggaagagaaaatgcagtcttggagagcccgtcttggcaaccctgtgcccttgatagaagagagagctgcccacttgggctgggcctggcatccagccccagaggagtgctcttgccactggccacagggcctggatttggggaggaagagcagggtccagggccagtggctgagcacggcctggagagatgtgggagttggggaaaggactttttatcagggctgcagaggttcggctctgggctggtggtagggggctggtggtaggcgaggtggctgcggtggcccttccgccaggtgtggggtagaccgcttagaagggaaaggggatcctgaagtgcctgaggaagaaacagcaatgagaaagcaatgggaaaaatgggcaataaatgggcataggggttagtgcccacaggcgctagtggctgtgaagtgcctttgaggtgcaaagggagctttttatgtatttgcttcaggtgtttttcattacatgtgtttcccttttattttccttgttatttggtccttagacttttcagcgatcccttgtattcgtctttttacataagcagaaacttttttttttcctccttagagagatactgtgggaggtattttgccttcagtgctttctctttcctgctttttttaaaatttaattttaaaattataaagtaaatttagtgctagtgaaagtgaggggggaaccagctggggctggagccagggaaggggtaggcagaggcagggttctgcctcccttcctgaggcagccccgccccaggaccctaggcccagcctggtgtcgcttgctcactctctctgctctcttctcttgatgccattctactcccctcaccttcctgcagggttcttgtggacagggatggggacagtgtatcccagtgggtgcccattctccctttgggaacccctggctctgcagagtcattttccttcatgacctacatactgaggccccccattccctgcctgccaggcaagcagggcgagaggaggggcccttgctcccctcagacactaaggctgtttggctttcagctcggcgggtcctgtttgtcccccatacatgccctgttagtctgctaaacccgctgcacagttggttgccctgttgatgggatcagagttgggcaggcatagagagatcacacacacacacacacacacacgcacacgcacacgcactctgcagcagtgaggatgagaggggtttctatttgccacacatttttgtggtcacatgaatagcacactctgctctataacacgtgtatgcacataggtgtttgcatttgatgatactggtgtgacaaggaggtatttctaagccatataaattatgagaactgtatagcttaaaaatttaaggcttgttcagcggtgctgaaaatgtttatttcttaatctgggtggggttacatgggtgtgttcactttgtgaaagtgtatcaagcggcctaacttacagtgtgtgcactttttatacctgccttgcttcagttaaaaagtttacttaaaaaaagaagccccactctcaaaggtaaagaaaaacctgtgcattacaaaatataataaaaatttaaataaaaatttcctccagcctgctttgcttagtccttcctgctaggaatggtgggagggcttgtaaaaaatagcgggctgatataaaagctagcaggcatgtggtccacgaggcatcctgacccgtccacatgtgtggagtgcctgaaaactgcctacagacaggtatagaggtaggattttaacatctcagggctaaaggataagaaatggtgaggagtaagttacttgccaattacattttgctgtcaacatctggaaagcaaaattgcagctgttctctctgcccctgccccccgcccccgcattgccacctcttcttttttttctgcacacttacattttttgtacgcttgccatttatacttcggttttctgcactgttaaaacaattccatggctctgttcaaattgggttgttgggtttgagttttttttttttttttaatggatcttgtagtctgacagtataatttttggagggatttatttaaacaggcccaggagccattgataatcccctcccttttctttcgccctctctgtcttcccagaactgctcaggccagcaatgagggggaggacgctcggcagcccttgccgggctccttcctttagcctctgctcctccgggcaggtactgacagcttcgccctccatggcccttctgtggtgtttttgttttctcttcgccccccaaaaatatttgaaccaaaaagcctcttttttttttcctccacccacagcaaactgaaaggactagtgaaccgtgattcaacagagcgagggcgcctcttttcttccttagcattaattaactcaagttcgttaggacgttgggtctgtcgcccacagttttctcttgtgtgtgctgaatcgggtcatagagggagacttcccgtgcaaacagtttgtgttggagctgaaggacgcagagggggagagagggtgagaaagaaagggagccggggagggacggagcgtggccgaggggtgggcatggtccgagctcctcaaagcacccccggtgtcattctctgcaggggctagacaccagggaaatgtggattcttgggtttcctgggcaatgatcctgataataaaatagttgcgggagcaatacattttgaggaattgaaaaatgacctctttctaactcctaaaattgtacattttggggttctggccactgcctgtggctgaagcaattgcaagaaagaggttccctcaggaccgaggggtgccaggccgatctgagggcaggtggtgaggagaaatccttccttgctccttgtctctcctgtggcgggggaaacagaactggtaaaaaatgaaggggggtgtctggactgatcctgatggagctcttgcagagggactgggaagacctctgccttttgggttttgtcaccttgccctgacccctccgaaggaggggatttgctgtggtgcctggggtgagttttcagcattttgccatttgctctggccttctctctcgacttccagatattttcacagtgtgctgggcacagacctcatcttcacgcgctggtctctctttgccttgccttttgtcactttttcagttcttcttcagaaagagttatgaagctggcctgtgcagttcttccctcttcccgggcccttggccaccatgaagtgacacttcccaagccggttaggtgtgtgaggctctgcacttcccttgcccccggaagcccttccctgtcatctgtccttcacgcacttcggaaggtttcatccccatgcagcctgccggctggagaagagagctttggccttcctggcttttacttctgtttggtgacacaaggaagtttcaagctaaataatgaattaaagagtaggatttttgtttcccattccttgtagaggatgagatgaaagtaaacaatttccagttgccttagagagaatagattgtctcccctaatatccccattcctaccctatattattctgtgccaagagggtaagggagatgtgcctggagcagaggagcatttggagccagaacgaggctgcctgttggcccgatcccaggccaccgctcctggtttgtagtctggaggagaaaaggaaggggcggggggggggggggggcgcggtttacaggagagaagtgtgcggcctggctgtgaggcagaccctgtcctagacccagcactggggtgtggggcgaatccattcagccagcatgaggacactggaaagaaactgcgcagagccgcctttcctgagcagaggaaaacaggcccaagtcagccaaaaacccgctttgtccaaattatccgagctccctcgcaaagtgcattttccggtttccattcctggagtttccagacttttggatgattttgttctgactacagagccccttctcgttggcccccaactgaggggaggccccaccctcctctaggataagcagcagggccccttccctggctgcccagtgctgccgctgcgtcatgtctgcagttcccttcccatctctggccgctgtctggccactgtcttcttgtggccttccacgaagcagcagtaatcttgggacaaggtgggagagctcagggttacgaagccggcttcttttggttcagaccaaggctgaattataaaattccaacaattgggcaaactaattggggccctgtttatggcctttttaatttcccatgtcctttcatacccaggctgcagatatgctttattaaaatggatactggaatatctggtcatttctgtgaagttttgtaagttatttgctctaattgcctgtagttacccagatcaacatgggcccaagtgtccaggatctgaaagaataaatctgggccttaaagccagcaggatgtggacacataggatttttttttttttaagataaagaaggctactaaaagtggccctgtcttaaaatatacaacttcttatgcttctagatgtttcactataggtaggtgcgggcaggttgcaaaacctatctcagtctgggaagattattttgtttccttgaagaatttttaacactgtatatgtgagtgaggtgctgtacatattttcctatttttcttcaaataatccatacaggctcagtggacaggtctgttgtgtagagtttttgaaaaccatgcatttcttctcatggagaagcagtcattttccttaactggtttttctttctctgccgcggtgcagagcccttttctgtcttcttatttttcttcctctgctgttctgtttccctccatctttgtccttctttcttttcagttgtgggcctagcttggcactctctctccaggtttggcttttttctcttttttcgttctccttctctctatttctctttctccgtggccctttcagtctttttctgttgggggtacatttctcctagtgatggctgaaactggcatgggtatgtattttagaaatgtttcagtgaaaactgttgctggttttttttttgtttgtttgttttttttttttttttaccaaatagtactcaacaataaaagacagaggcttttcttccataatggcagcaaaatccctttccacaaaccaaaaacccatatgaatttttaaaaagtcttatttctggcttctcgatgatttttctctccaatgggggaaatacctttcccccacaatgtttcctgcttttccttttttccccccttgtcttttttttttctcttcctattaccagcatcagtggcttcctttccccatttcccatgtccttctactctgtggcctgcatgtccccttgctctttccatcacctgaactcttacacttgccagtgactcagacctggagaagccttgaatcgtatgagggattttttgtcttgattctggtctttggtgcaggatgtaaagcggtctgatctcctgcctggggctggaggggagaagagaaggaggctgggctgggaacaggtaatcttccaacaggagcctccactctttaacaaaagggggacagtttccttttgtctagggctcatgaggggcgtgtctgggctgatggccgccaccagtggcatgcaggaggagggggcccgcagtgaagggtgcttgaaatgtttctaatggaacccgagcaattcctctgtgtgcgcccaaaataggaggggaggaagggagggagggaggaaagagaaatagagaaagagaccttctcatctcccgaagcatcagaatatcctggccactcctccagaaaggcctcctccactgggagccagcagcccatagagagaatggggtgaggggaaagtatttgcctgagaatcttctgcccacctgcaaggttatagccactggcaggagaaggacaattgacaattgttcttcctccaactttctgccctgggaaaggcctgttgcttcttctgttaagagagccttgagggggtgcttggggctctttgtaggtccctgaggctctattgagacactcttctgccgcctctcctctgatctctccgccagtccgtggagttttgacccccaacccctctccaggagccagtcgtgcatcttgtcctgtttccctaacttctacatggatccttccatctgtcatttcccagctgtgggactgttgctgcccccacctctatccctgacccagttgtaccaccagattcagattcaacccatgtcgagcatgtctcttctactgtggcactgtggtctgtgaagtggaacatgccaggattctccaggaggctcgtgttggccattttctgtttggtgtctaatatttagtataaatcagaatacaagaaaaacacctccatgccaaatataaactcacttgtagtttttaatgacctcatcttgactttagaaggtaaaattgtttccacaaggtggagaggcaggatttggtaccttatgtcatgtctctgagctaacatctttggctgattggactgaagctggttattaacatgatgtgaattattggacaccaccctaagaggcctgtctctgataccacctgccttctgtactctcacctctaaccgtttctttcagggatcagccatgagctcagttcacttgagatggataattcagggcacagactggggtcccaggtgttgggcagcccctctcccattgtcagggttcagcgccagcccagggctggatgttttattttggcatgccccaggtgctcttccgggaacctttctgccaacataaaggccacaaagcacagggtttcagttggggaagaaaggggcacgagtgagcagtgaccttttttccgtcgccagctgaggactgagcctcgctgagggagagggcggctgtagggatggggttctgagtggaattggatccctttctccctgtctgcagccacatccttcttcctctgcttttccttttatgtcatatctatttccttcttactgtgtttcgaaggcctcaagcatggctgctccatagctctaactggagagaccccctcagaagtgggactcccctacccagtgctcaccctttctgcttgctgtgaggaaggtccccaagtggaggaccagagcaggggctccccggtgggtcacttctctgtgacttgatttcccccaggtggcctgtttttgatagagccctttgctgttttttgttgtgtcctttcttagctcttttcttttcatttgggtttctcattttatacttttgcactttgcactgctagggtttgggctctttagtctaaattgatttgggagacaggtaagaaaactaatctcaggtcaactggagagggcagatctggagaattaaatgcctgtgcagtggtgaggggcgttggtcagattccttgcctctgctcagaggtagtgtccatctttttgcctttgtcacttctccccgggtctggctgttgtttgtggctgcgtgtagagcttgtcaggcggagtgctgtgacaggaggctattttaataaactgttgcagtttctcgagccgagctgtgttgcgttggcatccctcgtcaccgctaatggagtgtgcgtggctgggtgtgggccgaaggaggaggctgagcttgctgggggctgggggagaagggagggacgtgtggggtgctggcctcccccttgtctgagagtgctccttcagcagccagacctgggggcatcacaaggtggcagtaccctgggcaccagatccctgccctggaagtactgctggcatggacactttctgagctctctttcttcttatttctattcatagcaccgcaggcccgtgtgtatgtggccggggaggaaaacttccactcgcccctgtgtgctccataggaagaaaaaaaaaaagaaagaaagaaatagaaacagaaaaagagagtgtgcaggcccgagagaaagactgaaaccaaaacacagagagaaggcgcagctgcttccccaaggccttctggggctcccgcccgccagcccgccgggagtcaggcctttatttatttatttttcaggcttaaaaaaaaatttcgagtcttccacaatcccagtcccccccaatgccccaccccacccccagatttgctgggtggctgctgccaaatggacccgagtgggagcctggaatgaaaaattcataactgctggactttgcttgttcattagacgtgaacttgtcgattgggcaaattgtttttggtctccaactgccgggggctctccccaccctccctgctcgcccggttccctcctccccttggacgcagccattggctgctcgtggatgtctctttgccaaataggtggatccttctctctctttctctctctctctctctctctctctctgtctctttctccccccacccctttttactggcttggcacaagcaaatggatggggattgagcctgaaaggagagagagagagggagtttgagagagagaaaaggagcaaaaaaaaaaaacaccccaaaaacccaaccagtgcgcacacacacgcgcacactcacacacacgccccatcccatccacgtcctccctcgatcctcgatctctccctcccccccttcttcctttcctccctccctcgctccctctctctcttttgcacgcgtctgccagcaacggtctgcagccggtcagaactcgtcctcttccccgggaatctgcgagctcccccttttcctccgatcaggcagctcgaagtttacacccctgtgccgctgccaaagccgaaagcctttttcttcagctgccgctttttccctcctgggttttgtttttgtttttgttttgcacgggggtggggtggggtgcgttgttggttgtggggagatggtgggaggctggttttgatttttaaattttgcatttttttctttttttttttttttaaactggaagaggatgcacaggggaagaaattgaaaaaaaaattttgttggcttttgtttacctggcgtgtgtggcagccggctcgctccctctctctgcttgctatccctgacctttctttctttttgctccttttcaaaaaaaatattaatttcccccttctgtgcaatggagcatggggggggggaggagggggaagggtttgagaatccacccaagcccggcccctattccccagaacaccaataataaccccctttaaaacatttaccttcctcccctgctcctcctcctcccccctccccccacccgcccccaactcacaactcttttgagtccagaatctcagaatcgggcgttgggctttgccgggtgcttcagatcaatggtaattatttaattttttccagttttatttttgtaaacagaaatcaattattatttaaacttcaaacaagcaaacaaccaaaaaaaaaaaaaaaaaccaaacaaaaccgagagagcccatccttctgtcacctgactgagtgggaaaaagggtgaaggggttgtgggaggctggggaaggggtcgcaagaagacccatgtagcttttaaccctaatgtggccgagacaagcaccttatttgtgctaacaagaagtgttttgttcattattactgtgattaacattagtattggtgtcgataacaaagctgaaatcacatatttaggatttaggtctgattaaaaaatgttggggtggatgttccaactggatcaggagaaaagaaaatgaaaacagcctggggagagggaagcctgatctgtttcctcactcgcttgctcgtggatgtcattttctgtcttcttgggggcggccaaaaatcgaccggtgtcggggaccagaggcggccccgcacgcccccgcgtgtgcgtccacgggcgtctgtgcagacggacactgtgccggggcgagctgacaggagttcacggctgcgatagaacatggagatgtcatgggcgcgacagagcctggcggggataccagcagcgtgtgtgtgtggacggcaacgttgtctgtgcgcgtgtgtgtgagtgagtgagggagagagagagagaataggtgtgtgtagaggctcccggtgcctctgtctggctgctgaggctgagatgggagcaagtggctggcgaagctggtggtggcttcaaaccacactttcgtagaacaatcgcaagagaaaattgttggggggagggaggaggaggagaaggcggttttccttgtgcccccccttctaacgctgcttttctccttctctctttccccctcatcccgtcttcccctcctcccgtcctccctcgccccgcatgctcccggcttgccgcctgcaggatgagttccacccgttcatcgaggcactgctgcctcacgtccgcgctttctcctacacctggttcaacctgcaggcgcggaagcgcaagtacttcaagaagcatgaaaagcggatgtcgaaggacgaggagcgggcggtgaaggacgagctgctgggcgagaagcccgagatcaagcagaagtgggcatcccggctgctggccaagctgcgcaaggacatccggcccgagttccgcgaggacttcgtgctgaccatcacgggcaagaagcccccctgctgcgtgctctccaaccccgaccagaagggcaagatccggcggattgactgcctgcgccaggctgacaaggtgtggcggctggacctggtcatggtgattttgtttaaggggatccccctggaaagtactgatggggagcggctctacaagtcgcctcagtgctcgaaccccggcctgtgcgtccagccacatcacattggagtcacaatcaaagaactggatctttatctggcttactttgtccacactccgggtaggtcgttctcaaccatttttccctctcattttattttccttgctggcatttgttctgtttattgttcctctaatttccaagcgataactcgccatgggcctaactggtgtatgcccgtcctgcggggcctgcaacacggttctatgggcccttttcctttttcctgtcttctgtctcccccgacctgttctattcttcctcctctgccccctggccatggtatcgactttgtgcatctccatctttggaggacttatctgatcagaaagatgctgcaggtcttaggattggggacatgatgcccccagaattatccatgatggtgagagtttgagatgaacaacaacagcaaaccagtaattgctcttattaaaatgagtcagaagaagtattgaggggcaggtgctagttttactgcagcttcacctccagtcccaggaaaaactgggtttggtacaagcgggatgggcaggagtccggtggagagaaggggcatgtgaaaccctgggatatgagactgaatgaacagaaaagaggagagaagacagtagtgggcagattctgtggcctaaatactcaggcg
